(19) United States
(12) Patent Application Publication
(10) Pub. No.: US 2014/0322163 A1
(43) Pub. Date: Oct. 30, 2014

(54) NEUTRALIZING ANTIBODIES TO HIV-1 AND THEIR USE

(71) Applicant: The USA as represented by the Secretary, Departmen t of Health and Human Services, Bethesda, MD (US)

(72) Inventors: Peter D. Kwong, Washington, DC (US); Gary J. Nabel, Cambridge, MA (US); Rebecca S. Rudicell, Silver Springs, MD (US); John Mascola, Rockville, MD (US); Mark Connors, Bethesda, MD (US); Ivelin Georgiev, Gaithersburg, MD (US); Jiang Zhu, Ashburn, VA (US); Young Do Kwon, Rockville, MD (US); Tongqing Zhou, Boyds, MD (US); Yongping Yang, Potomac, MD (US); Baoshan Zhang, Bethesda, MD (US); Gwo-Yu Chuang, Rockville, MD (US); Xueling Wu, Potomac, MD (US); Zhi-yong Yang, Potomac, MD (US); Wei Shi, Rockville, MD (US)

(73) Assignee: The United States of America, as represented by the Secretary, Department of Health and Human Serv, Bethesda, MD (US)

(21) Appl. No.: 14/363,740

(22) PCT Filed: Dec. 10, 2012
(86) PCT No.: PCT/US2012/068827

§ 371 Date: Jun. 6, 2014

Related U.S. Application Data
(60) Provisional application No. 61/698,452, filed on Sep. 7, 2012.
(60) Provisional application No. 61/613,431, filed on Mar. 20, 2012.
(60) Provisional application No. 61/568,520, filed on Dec. 8, 2011.

(51) Int. Cl. C07K 16/10; A61K 45/06; G01N 33/569; A61K 39/42

(52) U.S. Cl. CPC C07K 16/1063; A61K 39/42; A61K 45/06; G01N 33/56983
USPC 424/85.2; 530/388.22; 530/387.3; 530/391.1; 530/391.3; 536/23.1; 424/143.1; 435/320.1; 435/252.33; 435/5

(57) ABSTRACT

Monoclonal neutralizing antibodies that specifically bind to HIV-1 gp120 and antigen binding fragments of these antibodies are disclosed. Nucleic acids encoding these antibodies, vectors and host cells are also provided. Methods for detecting HIV using these antibodies are disclosed. In addition, the use of these antibodies, antigen binding fragment, nucleic acids and vectors to prevent and/or treat an HIV infection is disclosed.

### CROSS REFERENCE TO RELATED APPLICATIONS

[0001] This claims the benefit of U.S. Provisional Application No. 61/698,452, filed on Sep. 7, 2012, U.S. Provisional Application No. 61/613,431, filed Mar. 20, 2012, and U.S. Provisional Application No. 61/568,520, filed Dec. 8, 2011; all of these prior applications are incorporated by reference in their entirety.

### FIELD OF THE DISCLOSURE

[0002] Monoclonal neutralizing antibodies are disclosed that bind to HIV-1 gp120, as well as their identification and use.

### BACKGROUND

[0003] Human Immunodeficiency Virus (HIV) infection, and the resulting Acquired Immunodeficiency Syndrome (AIDS) remain threats to global public health, despite extensive efforts to develop anti-HIV therapeutic agents. Some HIV-infected individuals eventually develop broadly neutralizing antibodies (bNAbs), which neutralize a large panel of HIV viruses. These individuals show delayed development of AIDS, even in the absence of any treatment for HIV infection.

[0004] One previously characterized HIV-1 neutralizing mAb, called b12, can bind to a site on gp120 that is required for viral attachment to its primary cellular receptor, CD4. mAb b12 was derived from a phage display library, a process which makes it impossible to know if the antibody was naturally present in an infected person, or was the result of a laboratory combination of antibody heavy and light chains. b12 can neutralize about 75% of Glade B strains of HIV-1 (those most common in North America), but it neutralizes less than 50% of other strains of HIV-1 found worldwide. Therefore, there is a need to develop additional neutralizing antibodies for HIV-1.

### SUMMARY OF THE DISCLOSURE

[0005] Disclosed herein is the identification of the VRC07 monoclonal antibody, which specifically binds to the CD4 binding site of the gp120 protein of HIV, and is neutralizing VRC07 is a VRC01-like monoclonal antibody, and includes a novel heavy chain (“VRC07 heavy chain”). This heavy chain can cross-complement with the light chain of the VRC01 monoclonal antibody. VRC07 heavy chain is a clonal variant of the VRC01 heavy chain. An antibody including the VRC07 heavy chain cross complemented with the VRC01 light chain has increased binding affinity for gp120 and does not have significantly increased self-reactivity compared to VRC01. Further disclosed herein are variants of the VRC07 heavy chain and the VRC01 light chain, and cross-complemented monoclonal antibodies including such variants that have increased binding affinity for gp120 and are not self-reactive, or have only low self reactivity, for example, compared to VRC01. In several embodiments, the disclosed variants of the VRC07 heavy chain and the VRC01 light chain include framework region amino acid substitutions (compared to VRC07 heavy chain or VRC01 light chain), but only include up to two amino acid substitutions in the CDRs (compared to VRC07 heavy chain or VRC01 light chain). Thus, disclosed herein is a class of monoclonal antibodies that have increased binding affinity for gp120, and are not self-reactive or have low self reactivity. In some embodiments, the disclosed antibodies further are not immunogenic, or have low immunogenicity.

[0006] Accordingly, isolated monoclonal neutralizing antibodies that specifically bind HIV-1 gp120 are provided herein. In certain examples, the binding and/or neutralization ability of these antibodies has been optimized. Also disclosed are compositions including these antibodies that specifically bind gp120, nucleic acids encoding these antibodies, expression vectors comprising the nucleic acids, and isolated host cells that express the nucleic acids. The antibodies can be fully human. In several embodiments, the antibodies include a heavy chain variable domain and a light chain variable domain.

[0007] In some embodiments, the isolated monoclonal antibody includes a heavy chain variable domain comprising amino acids 26-33 (CDR1), 51-58 (CDR2) and 97-114 (CDR3) of SEQ ID NO: 40, wherein the antibody specifically binds gp120 of HIV-1, wherein the antibody is neutralizing. In specific non-limiting examples, the isolated monoclonal antibody includes a heavy chain variable domain comprising (a) amino acids 26-33 (CDR1), 51-58 (CDR2) and 97-114 (CDR3) of SEQ ID NO: 40, wherein X₂ is G; or (b) amino acids 26-33 (CDR1), 51-58 (CDR2) and 97-114 (CDR3) of SEQ ID NO: 40, wherein X₂ is H, wherein the antibody specifically binds gp120 of HIV-1, and wherein the antibody is neutralizing.

[0008] In some embodiments, the heavy chain variable domain of the antibody comprises SEQ ID NO: 40. In some embodiments, the heavy chain variable domain of the antibody comprises one of SEQ ID NO: 32, SEQ ID NO: 258, SEQ ID NO: 259, or SEQ ID NO: 260.

[0009] In additional embodiments, the light chain variable domain of the antibody comprises amino acids 27-30 (CDR1), 48-50 (CDR2) and 87-91 (CDR3) of SEQ ID NO: 238. In specific non-limiting examples, the isolated monoclonal antibody includes a light chain variable domain comprising (a) amino 27-30 (CDR1), 48-50 (CDR2) and 87-91 (CDR3) of SEQ ID NO: 238, wherein X₁₁ is D (VRC01 light chain CDRs with F97D), (b) amino acids 27-30 (CDR1), 48-50 (CDR2) and 87-91 (CDR3) of SEQ ID NO: 238, wherein X₁₁ is K (VRC01 light chain CDRs with F97K), (c) amino acids 27-30 (CDR1), 48-50 (CDR2) and 87-91 (CDR3) of SEQ ID NO: 238, wherein X₁₁ is S (VRC01 light chain CDRs with F97S); or (d) amino acids 27-30 (CDR1), 48-50 (CDR2) and 87-91 (CDR3) of SEQ ID NO: 238, wherein X₁₁ is H (VRC01 light chain CDRs with F97H).

[0010] In some embodiments, the light chain variable domain of the antibody comprises SEQ ID NO: 238. In some embodiments, the light chain variable domain of the antibody comprises one of SEQ ID NO: 9, SEQ ID NO: 219, SEQ ID NO: 220, SEQ ID NO: 221, SEQ ID NO: 222, SEQ ID NO: 223, SEQ ID NO: 224, SEQ ID NO: 225, SEQ ID NO: 226, SEQ ID NO: 227, SEQ ID NO: 228, SEQ ID NO: 229, SEQ ID NO: 230, SEQ ID NO: 231, SEQ ID NO: 232, SEQ ID NO: 233, SEQ ID NO: 234, SEQ ID NO: 235, SEQ ID NO: 236, or SEQ ID NO: 237.

[0011] In several embodiments, a disclosed monoclonal antibody that specifically binds to gp120 includes a light chain including a disclosed light chain variable domain cross-complemented with a heavy chain including a disclosed heavy chain variable domain.

[0012] The antibodies and compositions disclosed herein can be used for a variety of purposes, such as for detecting an HIV-1 infection or diagnosing AIDS in a subject. These methods can include contacting a sample from the subject diagnosed with HIV-1 or AIDS with a human monoclonal antibody that specifically binds gp120, and detecting binding of the antibody to the sample. An increase in binding of the antibody to the sample relative to binding of the antibody to a control sample confirms that the subject has an HIV-1 infection and/or AIDS. In some embodiments, the methods further comprise contacting a second antibody that specifically binds gp120 with the sample, and detecting binding of the second antibody. In some non-limiting examples an increase in binding of the antibody to the sample relative to a control sample detects HIV-1 in the subject. In some non-limiting examples, the antibody specifically binds soluble gp120 in the sample. In some embodiments, the methods further comprise contacting a second antibody that specifically recognizes the gp120 specific antibody with the sample and detecting binding of the second antibody.

[0013] In additional embodiments, a method is disclosed for treating a subject with or at risk of an HIV infection, such as, but not limited to, an HIV seropositive subject or a subject with AIDS, or a person who has been exposed to potential HIV infection but not yet seroconverted. The methods include administering a therapeutically effective amount of one or more of the monoclonal antibodies, antigen binding fragment thereof, or nucleic acid encoding antibody or antigen binding fragment, disclosed herein.

[0014] The foregoing and other features and advantages of this disclosure will become more apparent from the following detailed description of a several embodiments which proceeds with reference to the accompanying figures.

### BRIEF DESCRIPTION OF THE FIGURES

[0015] FIGS. 1A and 1B are a set of dot plots illustrating results of isolation of individual memory B cells producing anti-gp120 antibodies by cell sorting. About twenty million peripheral blood mononuclear cells (PBMC) from donor 45 that were incubated with biotin-labeled RSC3 and ΔRSC3 complexed with SA-APC and SA-PE respectively, prior to addition to cells. As illustrated in the figure, fifty memory B cells with the phenotype of CD3−, CD8−, aqua blue−, CD14−, CD19+, CD20+, IgG+, IgM−, RSC3+ and ΔRSC3− were sorted using illustrated strategy into individual wells of a 96-well PCR plate containing lysis buffer. The VRC07b and VRC07c antibodies were identified from these sorted cells.

[0016] FIG. 2 is a protein sequence alignment showing the alignment of the heavy chain sequences of the VRC01 (SEQ ID NO: 5), VRC02 (SEQ ID NO: 197), VRC07 (SEQ ID NO: 2), VRC07b (SEQ ID NO: 3), VRC07c (SEQ ID NO: 4) and NIH4546 (SEQ ID NO: 196) monoclonal antibodies and the IGHV1-2*02 germline sequence (SEQ ID NO: 195). The framework (FR) and complementarity determining region (CDR) positions are shown.

[0017] FIGS. 3A-3B are a protein and nucleotide sequence alignment showing the alignment of the heavy chain protein sequences of the VRC01 (SEQ ID NO: 5), VRC02 (SEQ ID NO: 197), VRC07 (SEQ ID NO: 2), VRC07b (SEQ ID NO: 3), VRC07c (SEQ ID NO: 4) and NIH4546 (SEQ ID NO: 196) heavy chain variable domains and the corresponding nucleotide sequence encoding the VRC07 heavy chain variable domain (SEQ ID NO: 10) as well as the nucleotide residues that differ from the VRC07 nucleotide sequence.

[0018] FIG. 4 shows the alignment of the nucleotide sequences encoding the heavy chains of the VRC01 (SEQ ID NO: 13), VRC02 (SEQ ID NO: 197), VRC07 (SEQ ID NO: 10), VRC07b (SEQ ID NO: 11), VRC07c (SEQ ID NO: 12) and NIH4546 (SEQ ID NO: 196) monoclonal antibodies.

[0019] FIG. 5 is a protein sequence alignment showing the alignment of the light chain variable domain sequences of the VRC01 (SEQ ID NO: 9), VRC07b (SEQ ID NO: 7) and VRC07c (SEQ ID NO: 8) monoclonal antibodies. The IMGT CDR1, CDR2 and CDR3 sequences of each light chain sequence are underlined.

[0020] FIG. 6 is a table showing the results of antibody neutralization assays performed using the VRC01, VRC03, VRC-PG04 and VRC07 monoclonal antibodies. The VRC07 antibody included the VRC07 heavy chain variable domain and the VRC01 light chain variable domain. Neutralization was measured using HIV-1 Env-pseudoviruses (expressing HIV Env from the indicated HIV isotypes) to infect TZM-bl cells as described previously (see, e.g., PCT Pub. WO2011/038290) and luciferase assay was used as the output indicator. The virus input was set at a multiplicity of infection of approximately 0.01, which generally results in 100,000 to 400,000 relative light units (RLU) in a luciferase assay (Bright Glo, Promega, Madison, Wis.). The antibody concentrations were defined at the point of incubation with virus supernatant. Neutralization curves were fit by nonlinear regression using a 5-parameter hill slope equation. The 50% and 80% inhibitory concentrations (IC50 and IC80) are listed in the table and were reported as the antibody concentrations required to inhibit infection by 50% and 80% respectively.

[0021] FIGS. 7A-D are a set of tables showing the results of antibody neutralization assays performed using the VRC01, VRC03, VRC-PG04, VRC-CH31, 4E10 and VRC07 monoclonal antibodies. The VRC07 antibody included the VRC07 heavy chain variable domain (SEQ ID NO: 2) and the VRC01 light chain variable domain (SEQ ID NO: 9). Neutralization was measured as described in Example 2.

[0022] FIGS. 8A-8F show sequence alignments and tables concerning the VRC07 heavy chain variable domain and the VRC01 light chain variable domain. FIGS. 8A and 8B show protein sequence alignments of the heavy chain variable domain sequences of the VRC01 (SEQ ID NO: 5), VRC02 (SEQ ID NO: 197), VRC07 (SEQ ID NO: 2), VRC07b (SEQ ID NO: 3), VRC07c (SEQ ID NO: 4) and NIH4546 (SEQ ID NO: 196) monoclonal antibodies. The FR and CDR positions are shown using the IMGT (FIG. 8B) and Kabat (FIG. 8A) numbering schemes. FIG. 8C shows the protein sequence of the VRC01 light chain (SEQ ID NO: 9), with the Kabat and IMGT CDRs indicated. FIGS. 8D-8F show a table indicating the linear and Kabat positioning of the amino acids of the VRC07 heavy chain variable domain and the VRC01 light chain variable domain.

[0023] FIG. 9 illustrates one strategy used to optimize the VRC07 monoclonal antibody.

[0024] FIG. 10 is a series of digital images illustrating the protein structure of VRC07 (with the indicated amino acid substitutions) binding to gp120, and also a series of graphs showing results of surface plasma resonance experiments concerning the binding of the VRC07 (with the indicated amino acid substitutions) to gp120.

[0025] FIG. 11 shows the protein sequence alignment of the heavy chain variable domains of the VRC01 (SEQ ID NO: 5), VRC07 (SEQ ID NO: 2), VRC07 G54W, I30Q (SEQ ID NO: 24), VRC07 G54W, I30R (SEQ ID NO: 25), VRC07 G54W, S58N (SEQ ID NO: 26) monoclonal antibodies. The FR and CDR positions as determined using the IMGT and Kabat numbering schemes are shown.

[0026] FIGS. 12A-12B are a series of graphs illustrating the results of ELISA measurements of binding of the indicated monoclonal antibodies to the indicated gp120 proteins. Tested monoclonal antibodies include antibodies with VRC07, VRC07(G54W), VRC07(G54W, I30Q), VRC07(G54W, I30R) and VRC07(G54W, S58N) heavy chains, each complemented with the VRC01 light chain.

[0027] FIGS. 13A-13D are a series of graphs illustrating the results of ELISA measurements of binding of the indicated monoclonal antibodies to the indicated gp120 proteins.

[0028] FIG. 14 is a set of tables showing the results of HIV-1 neutralization assays performed using monoclonal antibodies including the VRC07, v1_v7h3_m03_G54W, v1_v7h3_m02_G54W, VRC07(G54W), VRC07(G54W, I30Q), VRC07(G54W, I30R) or VRC07(G54W, S58N) heavy chains, each complemented with the VRC01 light chain. Neutralization was measured using the methods described Example 2.

[0029] FIGS. 15A-15LL are a series of graphs illustrating the results of ELISA measurements of binding of the indicated monoclonal antibodies to the indicated gp120 proteins (“con” stands for consensus sequence). The heavy and light chains for each antibody are listed on top of each graph. The y-axis is OD at 450 nm and the x-axis is antibody concentration in μg/ml. The assay was performed in duplicate and values shown are an average. Antibody heavy and light chain pairings chosen for further neutralization studies are underlined. For FIGS. 15V-15W, “07” is an abbreviation for “VRC07” and all heavy chains were paired with VRC01 light chain). For FIGS. 15X-15EE, “07” is an abbreviation for “VRC07ghv,” “01L” is an abbreviation for VRC01 light chain, and if no light chain is listed, VRC01 light chain was the light chain used.

[0030] FIGS. 16A-16B are a set of tables showing the results of HIV-1 neutralization assays performed using monoclonal antibodies formed from the indicated heavy and light chains.

[0031] FIG. 17 shows a sequence alignment illustrating the partial germline reversion and mutants of heavy chains variable domains. The sequence of the following heavy chain variable domains is shown: VRC01gVH (SEQ ID NO: 198), VRC01ghvH03 (SEQ ID NO: 199), VRC01sVH (SEQ ID NO: 5), NIH4546ghvH01 (SEQ ID NO: 200), NIH4546ghvH02 (SEQ ID NO: 201) NIH4546sVH (SEQ ID NO: 196), VRC07gVH (SEQ ID NO: 202), VRC07ghvH01 (SEQ ID NO: 203), VRC07ghvH02 (SEQ ID NO: 204), VRC07ghvH04.1 (SEQ ID NO: 205), VRC07ghvH04.2 (SEQ ID NO: 206), VRC0ghvH05 (SEQ ID NO: 207), and VRC07sVH (VRC07; SEQ ID NO: 2). The sequence of the following light chain variable domains is shown: VRC01gVL (SEQ ID NO: 208), VRC01ghvL01 (SEQ ID NO: 209), VRC01ghvL02 (SEQ ID NO: 210), VRC01ghvL04 (SEQ ID NO: 211), VRC01N72T (SEQ ID NO: 212), VRC01ghvL05 (SEQ ID NO: 213), VRC01sVL (VRC01; SEQ ID NO: 9), NIH4546glvL01 (SEQ ID NO: 214), and NIH4546sVL (NIH4546; SEQ ID NO: 215).

[0032] FIG. 18 shows a sequence and a three dimensional structure illustrating the gp120 binding surface of the VRC01 monoclonal antibody and the residues of the VRC01 heavy and light chains that were selected for alanine scanning mutagenesis. VRC01 binding energy hot spots: (A) Amino acid sequence of VRC01 heavy chain variable domain (SEQ ID NO: 5). Bold letters indicate VRC01 residues contacting gp120. Single dot, double dot and triple dot below the amino acid sequence indicates positions that when mutated to alanine resulted in a significant decrease in affinity for gp120. Reduction in binding K_{D}—single dot>double dot>triple dot. Alanine mutation at Kabat position G54 of the VRC01 heavy chain resulted in almost four times increase in affinity of VRC01 to gp120 protein. (B) Structural mapping of important contact residues on VRC01-heavy and light chains. Light to medium grey indicates a reduction in binding affinity. White indicates no change in binding. Dark grey indicates an increase in binding K_{D}.

[0033] FIGS. 19A-19C are a series of tables presenting affinity measurements for VRC01 monoclonal antibody (containing the indicated alanine substitution) binding to gp120 analyte RSC3 (FIG. 19A), gp120 from HIV-1 strain YU2 (FIG. 19B), and gp120 from HIV-1 strain ZM109 (FIG. 19C). The calculated K_{D} is indicated.

[0034] FIG. 20 is a set of bar graphs of an ELISA for VRC07 G54 heavy chain variants (the VRC07 G54 variant was complemented with VRC01 light chain). In addition to G54F, G54R, G54W, and G54Y, which showed improved binding to Glade A gp120s, G54A, G54H, G54K, G54M, and G54Q showed enhanced binding to two Glade A viruses tested; among them, G54H showed most improved biding to the gp120s.

[0035] FIG. 21 is a set of bar graphs of an ELISA for VRC07 G54 heavy chain variants (the VRC07 G54 variant was complemented with VRC01 light chain). In addition to G54F, G54R, G54W, and G54Y, which showed improved binding to Glade B gp120s, G54A, G54H, G54K, G54M, G54Q, and G54V showed enhanced binding to a Glade B or a Glade C virus.

[0036] FIG. 22 is a bar graph of an ELISA for VRC07 G54 heavy chain variants (the VRC07 G54 variant was complemented with VRC01 light chain). In addition to G54F, G54R, G54W, and G54Y, which showed improved binding to Du172 gp120s, G54A, G54H, G54K, G54M, and G54Q showed enhanced binding to the virus. Among them, G54H showed most improved biding to the gp120 that is resistant to VRC01.

[0037] FIG. 23 is a table showing results from anti-cardiolipin assays of the indicated monoclonal antibodies. Anti-cardiolipin assays are used to indicate if an antibody is self-reactive. VRC07 heavy chain and the indicated variant VRC07 heavy chains were complemented with VRC01 light chain to form functional antibodies. The results indicate that a monoclonal antibody including the VRC07 G54H heavy chain variable domain and the VRC01 light chain variable domain is not autoreactive.

[0038] FIG. 24 is a set of tables showing results of neutralization experiments using antibodies including the indicated heavy and light chain variable domains. The results indicate that an antibody including the VRC07 G54H variant heavy chain complemented with VRC01 light chain increased neutralization potency >2 fold compared to VRC07 heavy chain complemented with VRC01 light chain. Thus, in a TZM-bl neutralization assay, VRC07 G54H neutralizes the selected viruses more potently than VRC07. The estimated fold improvement over VRC07 is about 2.3 and 2.5 fold when their geometric means of IC50 and IC80, respectively, are compared.

[0039] FIG. 25 shows a nucleic acid sequence encoding the VRC07 G54H heavy chain variable domain (SEQ ID NO: 37) and the amino acid sequence of the VRC07 G54H heavy chain variable domain (SEQ ID NO: 32).

[0040] FIG. 26 is a schematic diagram showing design of partially-reverted antibody variants.

[0041] FIG. 27 is a schematic diagram showing the design of partially-reverted antibody variants by CDR grafting.

[0042] FIG. 28 shows the sequences of partial revertants of VRC07 heavy chain and VRC01 light chain. The sequence of the following heavy chain variable domains is shown: VRC01gVH (SEQ ID NO: 198), VRC07gVH (SEQ ID NO: 202), VRC07ghvH01 (SEQ ID NO: 203), VRC07ghvH02 (SEQ ID NO: 204), VRC07ghvH04.1 (SEQ ID NO: 205), VRC07ghvH04.2 (SEQ ID NO: 206), VRC07ghvH05 (SEQ ID NO: 207), VRC07ghvH05.1 (SEQ ID NO: 216), VRC07ghvH05.2 (SEQ ID NO: 217), VRC07ghvH05.3 (SEQ ID NO: 218), and VRC07sVH (SEQ ID NO: 2). The sequence of the following light chain variable domains is shown: VRC01gVL (SEQ ID NO: 208), VRC01ghvL01 (SEQ ID NO: 209), VRC01ghvL02 (SEQ ID NO: 210), VRC01ghvL04 (SEQ ID NO: 211), VRC01_N72T (SEQ ID NO: 212), VRC01ghvL05 (SEQ ID NO: 213), and VRC01sVL (VRC01; SEQ ID NO: 9).

[0043] FIG. 29 is a table showing results of neutralization experiments using antibodies including the indicated heavy and light chains. VRC07ghvH05.3 refers to VRC07 heavy chain with R3Q, I37V, and T93A amino acid substitutions. VRC07ghvH05.3.1 refers to VRC07 heavy chain with I37C and T93A amino acid substitutions. VRC01-E1-del refers to VRC01 light chain with the first two amino acids (E1 and 12) deleted.

[0044] FIG. 30 is a ribbon diagram of VRC07ghvH05.3 showing the R3Q, I37V, and T93A amino acid substitutions

[0045] FIG. 31 is a schematic diagram illustrating the deletion of the first two amino acids from the VRC01 light chain.

[0046] FIG. 32 is a table listing the VRC01/07 light chain variants.

[0047] FIG. 33 is a table showing results of neutralization experiments using antibodies including the indicated heavy and light chains. The results indicate the increased potency achieved with deletion of the first two amino acids of the light chain variable domain.

[0048] FIG. 34 is a table showing results of neutralization experiments using antibodies including the indicated heavy and light chains. The results indicate the increased potency achieved with deletion of the first two amino acids of the light chain variable domain.

### SEQUENCE LISTING

[0049] The nucleic and amino acid sequences listed in the accompanying sequence listing are shown using standard letter abbreviations for nucleotide bases, and three letter code for amino acids, as defined in 37 C.F.R. 1.822. Only one strand of each nucleic acid sequence is shown, but the complementary strand is understood as included by any reference to the displayed strand. The Sequence Listing is submitted as an ASCII text file in the form of the file named “Sequence.txt” (˜750 kb), which was created on Dec. 10, 2012, which is incorporated by reference herein. In the accompanying sequence listing:

[0050] SEQ ID NO: 1 is the amino acid sequence of the consensus heavy chain variable domain of the VRC07, VRC07b and VRC07c gp120 specific monoclonal antibodies with and without certain amino acid substitutions at positions I30, G54 and S58 (Kabat numbering).
[0051] QVRLSQSGGQX_{1[}11]KKPGDSMRISCRASGYX_{2[}28]FX_{12[}30]NCPINWIRLAPGX_{3[}43]RPEWMGWX_{4[}51]KPRX_{13[}55]GAVX_{5[}59]YARQX_{6[}64]QGRVTMTRDX_{7[}74]YSX_{8[}77]TAFLELRX_{9[}85]LTSDDTAVYFCTR GKYCTARDYYNWDFEHWGX_{10[}117]GTX_{11[}120]VTVSS, wherein X₁ is M or V, X₂ is E or D, X₃ is K or R, X₄ is M or V, X₅ is N or S, X₆ is L or F, X₇ is M or V, X₈ is E or D, X₉ is S, A or P, X₁₀ is Q or R and X₁₁ is P or L, X₁₂ is I, R or Q, X₁₃ is A, H, K, M, Q, V, G, F, R, Y or W.

[0052] SEQ ID NO: 2 is the amino acid sequence of the heavy chain variable domain of gp120-specific antibody VRC07.

[0053] SEQ ID NO: 3 is the amino acid sequence of the heavy chain variable domain of gp120-specific antibody VRC07b.

[0054] SEQ ID NO: 4 is the amino acid sequence of the heavy chain variable domain of gp120-specific antibody VRC07c.

[0055] SEQ ID NO: 5 is the amino acid sequence of the heavy chain variable domain of gp-120 specific antibody VRC01.

[0056] SEQ ID NO: 6 is the amino acid sequence of the consensus light chain variable domain of the VRC01, VRC07b and VRC07c gp120-specific antibodies.
[0057] EIVLTQSPX_{1[}9]TLSLSPGEX_{2[}18]AIX_{3[}21]SCRTX_{4[}26]QYGSLAWYQQRPGQAPRLVIYX_{5[}48]GSTRAX 6[53]GIPDRFSGSRWGX₇X_{8[}68]YNLTISNLESX_{9[}79]DFGVYYCQQYEFFGQGTKVQVDIK, wherein X₁ is A or G, X₂ is R or T, X₃ is I or L, X₄ is S or T, X₅ is S or A, X₆ is A or T, X₇ is A or P, X₈ is E or D, and X₉ is E or G.

[0058] SEQ ID NO: 7 is the amino acid sequence of the light chain variable domain of gp120-specific antibody VRC07b.

[0059] SEQ ID NO: 8 is the amino acid sequence of the light chain variable domain of gp120-specific antibody VRC07c.

[0060] SEQ ID NO: 9 is the amino acid sequence of the light chain variable domain of gp120-specific antibody VRC01.

[0061] SEQ ID NO: 10 is an exemplary nucleic acid sequence encoding the heavy chain variable domain of gp120-specific antibody VRC07.

[0062] SEQ ID NO: 11 is an exemplary nucleic acid sequence encoding the heavy chain variable domain of gp120-specific antibody VRC07b.

[0063] SEQ ID NO: 12 is an exemplary nucleic acid sequence encoding the heavy chain variable domain of gp120-specific antibody VRC07c.

[0064] SEQ ID NO: 13 an exemplary nucleic acid sequence encoding the heavy chain variable domain of gp-120 specific antibody VRC01.

[0065] SEQ ID NO: 14 is an exemplary nucleic acid sequence encoding the light chain variable domain of gp120-specific antibody VRC07b.

[0066] SEQ ID NO: 15 is an exemplary nucleic acid sequence encoding the light chain variable domain of gp120-specific antibody VRC07c.

[0067] SEQ ID NO: 16 is an exemplary nucleic acid sequence encoding the light chain variable domain of gp120-specific antibody VRC01.

[0068] SEQ ID NO: 17 is the nucleic acid sequence of a nucleic acid primer.

[0069] SEQ ID NO: 18 is the nucleic acid sequence of a nucleic acid primer.

[0070] SEQ ID NO: 19 is the nucleic acid sequence of a nucleic acid primer.

[0071] SEQ ID NO: 20 is the nucleic acid sequence of a nucleic acid primer.

[0072] SEQ ID NO: 21 is the nucleic acid sequence of a nucleic acid primer.

[0073] SEQ ID NO: 22 is the nucleic acid sequence of a nucleic acid primer.

[0074] SEQ ID NO: 23 is the amino acid sequence of the consensus heavy chain variable domain for VRC07 gp120 specific monoclonal antibodies with certain amino acid substitutions at positions I30, G54 and S58 (Kabat numbering).
[0075] QVRLSQSGGQMKKPGDSMRISCRASGYEFX_{1[}30]NCPINWIRLAPGKRPEWMGWMKPRX_{2[}55]GAVX₃ [59]YARQLQGRVTMTRDMYSETAFLELRSLTSDDTAVYFCTRGKYCTARDYYNWDFEHWGQGTPV TVSS, wherein X₁ is I, R or Q, X₂ is G, F, R, Y or W and X₃ is S or N.

[0076] SEQ ID NO: 24 is the amino acid sequence of the heavy chain variable domain of gp120-specific antibody VRC07 G54W, I30Q.

[0077] SEQ ID NO: 25 is the amino acid sequence of the heavy chain variable domain of gp120-specific antibody VRC07 G54W, I30R.

[0078] SEQ ID NO: 26 is the amino acid sequence of the heavy chain variable domain of gp120-specific antibody VRC07 G54W, S58N.

[0079] SEQ ID NO: 27 is the amino acid sequence of the light chain variable domain of the gp120-specific antibody VRC01 N72A.

[0080] SEQ ID NO: 28 is the amino acid sequence of the heavy chain variable domain of gp120-specific antibody VRC07 G54W.

[0081] SEQ ID NO: 29 is the amino acid sequence of the consensus heavy chain of the VRC07, VRC07b and VRC07c gp120 specific antibodies.
[0082] QVRLSQSGGQX_{1[}11]KKPGDSMRISCRASGYX_{2[}28]FINCPINWIRLAPGX_{3[}43]RPEWMGWX_{4[}51]KPR GGAVX_{5[}59]YARQX_{6[}64]QGRVTMTRDX_{7[}74]YSX_{8[}77]TAFLELRX_{9[}85]LTSDDTAVYFCTRGKYCTA RDYYNWDFEHWGX_{10[}117]GTX_{11[}120]VTVSS, wherein X₁ is M or V, X₂ is E or D, X₃ is K or R, X₄ is M or V, X₅ is N or S, X₆ is L or F, X₇ is M or V, X₈ is E or D, X₉ is S, A or P, X₁₀ is Q or R and X₁₁ is P or L.

[0083] SEQ ID NO: 30 is the amino acid sequence of the heavy chain variable domain of the gp120 specific antibody VRC07 with a A, F, H, K, M, Q, R, V, W, or Y amino acid substitution at Kabat position G54.

[0084] SEQ ID NO: 31 is the amino acid sequence of the heavy chain variable domain of the gp120 specific antibody VRC07 G54A.

[0085] SEQ ID NO: 32 is the amino acid sequence of the heavy chain variable domain of the gp120 specific antibody VRC07 G54H.

[0086] SEQ ID NO: 33 is the amino acid sequence of the heavy chain variable domain of the gp120 specific antibody VRC07 G54K.

[0087] SEQ ID NO: 34 is the amino acid sequence of the heavy chain variable domain of the gp120 specific antibody VRC07 G54M.

[0088] SEQ ID NO: 35 is the amino acid sequence of the heavy chain variable domain of the gp120 specific antibody VRC07 G54Q.

[0089] SEQ ID NO: 36 is the amino acid sequence of the heavy chain variable domain of the gp120 specific antibody VRC07 G54V.

[0090] SEQ ID NO: 37 is a nucleic acid sequence encoding VRC07 G54H (see FIG. 25).

[0091] SEQ ID NO: 38 is the amino acid sequence of a consensus VRC07 heavy chain with partial germline reversions.

[0092] SEQ ID NO: 39 is the amino acid sequence of VRC07 heavy chain with three amino acids reverted to the germline.

[0093] SEQ ID NO: 40 is the consensus amino acid sequence of a heavy chain of VRC07 with amino acid substitutions at one or more of positions I37, G54, S58, and T93 (Kabat numbering).

[0094] SEQ ID NO: 41 is the amino acid sequence of a consensus VRC07 light chain.

X₁X₂VLTQSPGTLSLSPGETAX₃ISCRTSQYGSLAWYQQRPGQAPRLVIY
SGSTRAAGIPDRFSGSRX₄GPDYX₅LTISNLESGDFGVYYCQQYEFFGQG
TKVQX₆DX₇K

[0095] wherein X₁ is E or no amino acid, X₂ is I or no amino acid, wherein X₃ is T or I, X₄ is W or S, X₅ is N or T, X₆ is V or Q, and X₇ is I or N.

[0096] SEQ ID NO: 42 is the amino acid sequence of a consensus VRC07 light chain.

X₁X₂X₃X₄TQSPGTLSLSPGETAIISCRTSQYGSLAWYQQRPGQAPRLVI
YSGSTRAAGIPDRFSGSRWGPDYX₅LTISNLESGDFGVYYCQQYELLGQG
TKVQVDIK

[0097] wherein X₁ is E, G, A or no amino acid, X₂ is I, G, A, or no amino acid, X₃ is V, G, A or no amino acid, X₄ is L, G, A or no amino acid and X₅ is N, F or T.

[0098] SEQ ID NO: 43 is the consensus amino acid sequence of a light chain variable domain.

[0099] SEQ ID NO: 44 is the consensus amino acid sequence of a light chain variable domain.

[0100] SEQ ID NO: 45 is the amino acid sequence of a peptide.

[0101] SEQ ID NO: 46 is the amino acid sequence of a peptide.

[0102] SEQ ID NO: 47 is the amino acid sequence of a peptide.

[0103] SEQ ID NO: 48 is the amino acid sequence of a peptide linker SEQ ID NO: 49 is the nucleotide sequence of an oligonucleotide.

[0104] SEQ ID NO: 50 is the amino acid sequence of the VRC01hpL02 light chain variable domain.

[0105] SEQ ID NO: 51 is the amino acid sequence of the VRC01ghvL05 light chain variable domain.

[0106] SEQ ID NO: 53 is the amino acid sequence of the VRC01 light chain variable domain with deletion of the E1 and 12 amino acids.

[0107] SEQ ID NO: 54 is the amino acid sequence of the VRC01 light chain variable domain with deletion of the E1 and 12 amino acids, and a N72T amino acid substitution.

[0108] SEQ ID NO: 55 is the amino acid sequence of the VRC01hpL02 light chain variable domain.

[0109] SEQ ID NO: 56 is the amino acid sequence of the VRC01hpL02 light chain variable domain with deletion of the E1 and 12 amino acids.

[0110] SEQ ID NOs: 57-100 are the nucleotide sequences of plasmids and plasmid inserts encoding VRC07 heavy chain variants, as indicated in Table 2.

[0111] SEQ ID NOs: 101-108 are the nucleotide and protein sequences of VRC07 heavy chain variants, as indicated in Table 3.

[0112] SEQ ID NOs: 109-194 are the nucleotide sequences of plasmids and plasmid inserts encoding VRC07 heavy chain and VRC01 light chain variants, as indicated in Table 2.

[0113] SEQ ID NO: 195 is the amino acid sequence of IGHV1-2*02 germline. SEQ ID NO: 196 is the amino acid sequence of the heavy chain variable domain of VRC4546.

[0114] SEQ ID NO: 197 is the amino acid sequence of the heavy chain variable domain of VRC02.

[0115] SEQ ID NO: 198 is the amino acid sequence of VRC01 heavy chain germline sequence (VRC01_gVH).

[0116] SEQ ID NO: 199 is the amino acid sequence of the VRC01_ghvH03 heavy chain variable domain.

[0117] SEQ ID NO: 200 is the amino acid sequence of the VRC4546ghvH01 heavy chain variable domain.

[0118] SEQ ID NO: 201 is the amino acid sequence of the VRC4546ghvH02 heavy chain variable domain.

[0119] SEQ ID NO: 202 is the amino acid sequence of the VRC07_gVH germline sequence.

[0120] SEQ ID NO: 203 is the amino acid sequence of the VRC07ghvH01 heavy chain variable domain.

[0121] SEQ ID NO: 204 is the amino acid sequence of the VRC07ghvH02 heavy chain variable domain.

[0122] SEQ ID NO: 205 is the amino acid sequence of the VRC07ghvH04.1 heavy chain variable domain.

[0123] SEQ ID NO: 206 is the amino acid sequence of the VRC07ghvH04.2 heavy chain variable domain.

[0124] SEQ ID NO: 207 is the amino acid sequence of the VRC07ghvH05 heavy chain variable domain.

[0125] SEQ ID NO: 208 is the amino acid sequence of the VRC01gVL germline.

[0126] SEQ ID NO: 209 is the amino acid sequence of the VRC01ghvL01 light chain variable domain.

[0127] SEQ ID NO: 210 is the amino acid sequence of the VRC01ghvL02 light chain variable domain.

[0128] SEQ ID NO: 211 is the amino acid sequence of the VRC01ghvL04 light chain variable domain.

[0129] SEQ ID NO: 212 is the amino acid sequence of the VRC01N72T light chain variable domain.

[0130] SEQ ID NO: 213 is the amino acid sequence of the VRC01ghvL05 light chain variable domain.

[0131] SEQ ID NO: 214 is the amino acid sequence of the VRC4546ghvL01 light chain variable domain.

[0132] SEQ ID NO: 215 is the amino acid sequence of the VRC4546L light chain variable domain.

[0133] SEQ ID NO: 216 is the amino acid sequence of the VRC07ghvH05.1 heavy chain variable domain.

[0134] SEQ ID NO: 217 is the amino acid sequence of the VRC07ghvH05.2 heavy chain variable domain.

[0135] SEQ ID NO: 218 is the amino acid sequence of the VRC07ghvH05.3 heavy chain variable domain.

[0136] SEQ ID NO: 219 is the amino acid sequence of the VRC01 E1/I2del V3E light chain variable domain.

[0137] SEQ ID NO: 220 is the amino acid sequence of the VRC01 E1/I2del V3K light chain variable domain.

[0138] SEQ ID NO: 221 is the amino acid sequence of the VRC01 E1/I2del V3S light chain variable domain.

[0139] SEQ ID NO: 222 is the amino acid sequence of the VRC01 E1/I2del F97D light chain variable domain.

[0140] SEQ ID NO: 223 is the amino acid sequence of the VRC01 E1/I2del F97K light chain variable domain.

[0141] SEQ ID NO: 224 is the amino acid sequence of the VRC01 E1/I2del F97S light chain variable domain.

[0142] SEQ ID NO: 225 is the amino acid sequence of the VRC01 E1/I2del F97H light chain variable domain.

[0143] SEQ ID NO: 226 is the amino acid sequence of the VRC01 E1/I2del V3E/F97S light chain variable domain.

[0144] SEQ ID NO: 227 is the amino acid sequence of the VRC01 E1/I2del V3E/F97H light chain variable domain.

[0145] SEQ ID NO: 228 is the amino acid sequence of the VRC01hpL03 light chain variable domain.

[0146] SEQ ID NO: 229 is the amino acid sequence of the VRC01hpL04 light chain variable domain.

[0147] SEQ ID NO: 230 is the amino acid sequence of the VRC01hpL05 light chain variable domain.

[0148] SEQ ID NO: 231 is the amino acid sequence of the VRC01hpL06 light chain variable domain.

[0149] SEQ ID NO: 232 is the amino acid sequence of the VRC01hpL02 E1/I2del V3S light chain variable domain.

[0150] SEQ ID NO: 233 is the amino acid sequence of the VRC01 hpL03 E1/I2del V3S light chain variable domain.

[0151] SEQ ID NO: 234 is the amino acid sequence of the VRC01 hpL04 E1/I2del V3S light chain variable domain.

[0152] SEQ ID NO: 235 is the amino acid sequence of the VRC01hpL05 E1/I2del V3S light chain variable domain.

[0153] SEQ ID NO: 236 is the amino acid sequence of the VRC01hpL06 E1/I2del V3S light chain variable domain.

[0154] SEQ ID NO: 237 is the amino acid sequence of the VRC01hpL04 E1/I2del V3E light chain variable domain.

[0155] SEQ ID NO: 238 is a consensus amino acid sequence of the VRC01 light chain variable domain with one or more amino acid substitutions or deletions.

[0156] SEQ ID NO: 239 is the amino acid sequence of an antibody light chain including the VRC01 E1/I2del V3E light chain variable domain.

[0157] SEQ ID NO: 240 is the amino acid sequence of an antibody light chain including the VRC01 E1/I2del V3K light chain variable domain.

[0158] SEQ ID NO: 241 is the amino acid sequence of an antibody light chain including the VRC01 E1/I2del V3S light chain variable domain.

[0159] SEQ ID NO: 242 is the amino acid sequence of an antibody light chain including the VRC01 E1/I2del F97D light chain variable domain.

[0160] SEQ ID NO: 243 is the amino acid sequence of an antibody light chain including the VRC01 E1/I2del F97K light chain variable domain.

[0161] SEQ ID NO: 244 is the amino acid sequence of an antibody light chain including the VRC01 E1/I2del F97S light chain variable domain.

[0162] SEQ ID NO: 245 is the amino acid sequence of an antibody light chain including the VRC01 E1/I2del F97H light chain variable domain.

[0163] SEQ ID NO: 246 is the amino acid sequence of an antibody light chain including the VRC01 E1/I2del V3E/F97S light chain variable domain.

[0164] SEQ ID NO: 247 is the amino acid sequence of an antibody light chain including the VRC01 E1/I2del V3E/F97H light chain variable domain.

[0165] SEQ ID NO: 248 is the amino acid sequence of an antibody light chain including the VRC01hpL03 light chain variable domain.

[0166] SEQ ID NO: 249 is the amino acid sequence of an antibody light chain including the VRC01hpL04 light chain variable domain.

[0167] SEQ ID NO: 250 is the amino acid sequence of an antibody light chain including the VRC01hpL05 light chain variable domain.

[0168] SEQ ID NO: 251 is the amino acid sequence of an antibody light chain including the VRC01hpL06 light chain variable domain.

[0169] SEQ ID NO: 252 is the amino acid sequence of an antibody light chain including the VRC01hpL02 E1/I2del V3S light chain variable domain.

[0170] SEQ ID NO: 253 is the amino acid sequence of an antibody light chain including the VRC01hpL03 E1/I2del V3S light chain variable domain.

[0171] SEQ ID NO: 254 is the amino acid sequence of an antibody light chain including the VRC01hpL04 E1/I2del V3S light chain variable domain.

[0172] SEQ ID NO: 255 is the amino acid sequence of an antibody light chain including the VRC01hpL05 E1/I2del V3S light chain variable domain.

[0173] SEQ ID NO: 256 is the amino acid sequence of an antibody light chain including the VRC01hpL06 E1/I2del V3S light chain variable domain.

[0174] SEQ ID NO: 257 is the amino acid sequence of an antibody light chain including the VRC01hpL04 E1/I2del V3E light chain variable domain.

[0175] SEQ ID NO: 258 is the amino acid sequence of the VRC07 G54H S58N heavy chain variable domain.

[0176] SEQ ID NO: 259 is the amino acid sequence of the VRC07 I37V G54H T93A heavy chain variable domain.

[0177] SEQ ID NO: 260 is the amino acid sequence of the VRC07 I37V G54H S58N T93A heavy chain variable domain.

### DETAILED DESCRIPTION

[0178] Broadly neutralizing HIV-1 antibodies (bNAbs), antibodies that can block infection of diverse HIV-1 strains, represent important but underdeveloped therapeutics for the prevention and treatment of AIDS. bNAbs target conserved sites of vulnerability on the HIV-1 envelope (env) such as the CD4 binding site (CD4bs). The b12 monoclonal antibody was for many years considered the prototype and optimal CD4bs bNAb, although it was only able to neutralize ˜40% of HIV-1 strains. In 2010, a new group of CD4bs antibodies named VRC01, VRC02, and VRC03 was disclosed. Of these, VRC01 was the most potent and broad. In a large neutralization panel (190 viruses), VRC01 neutralized 91% of viruses with an IC₅₀ less than 50 μg/ml and 72% of viruses with an IC₅₀ less than 1 μg/ml (Wu et al., Science, 329(5993):856-861, 2010). Structural analyses have explained VRC01's high potency and breadth: VRC01 partially mimics the CD4 interaction with gp120. Specifically, the majority of the gp120 area targeted by VRC01 is the highly conserved site of initial CD4 attachment in the outer domain of gp120, which allows VRC01 to bypass conformational and glycan masking that impaired previously identified CD4bs bNAbs. Both the heavy and light chain of VRC01 contribute to the binding of gp120, with the CDRH2 providing the primary interaction, and CDRL1, CDRL3, CDRH1, and CDRH3 providing additional contact points. It has been shown that passive transfer of VRC01 protects against intrarectal or intravaginal simian-HIV (SHIV) challenge in non-human primates.

[0179] Despite the success of VRC01, there is a need for additional broadly neutralizing antibodies that can inhibit HIV infection, particularly broadly neutralizing antibodies that have increased affinity for gp120, but not increase reactivity towards self antigens, compared to VRC01.

[0180] Disclosed herein is the identification of the VC07 monoclonal antibody, which specifically binds to the CD4 binding site of the gp120 protein of HIV, and is neutralizing VRC07 is a VRC01-like monoclonal antibody, and includes a novel heavy chain (“VRC07 heavy chain”) cross complemented with the light chain of the VRC01 monoclonal antibody. VRC07 has increased binding affinity for gp120, but does not have significantly increased self-reactivity, for example, compared to VRC01. Further disclosed herein are variants of the VRC07 heavy chain and the VRC01 light chain, and cross-complemented monoclonal antibodies including such variants that have increased binding affinity for gp120, but are not self-reactive or have low self reactivity compared to a control. In several embodiments, the disclosed variants of the VRC07 heavy chain and the VRC01 light chain include framework region amino acid substitutions (compared to VRC07 heavy chain or VRC01 light chain), but only include up to two amino acid substitutions in the CDRs (compared to VRC07 heavy chain or VRC01 light chain). Thus, disclosed herein is a class of monoclonal antibodies that have increased binding affinity for gp120, and are not self-reactive or have low self reactivity. In some embodiments, the disclosed antibodies further are not immunogenic, or have low immunogenicity.

[0181] The person of ordinary skill in the art will appreciate that the disclosed antibodies have utility, for example, as therapeutic agents for treatment and prevention of HIV infection

### I. Terms

[0182] Unless otherwise noted, technical terms are used according to conventional usage. Definitions of common terms in molecular biology can be found in Benjamin Lewin, Genes VII, published by Oxford University Press, 1999; Kendrew et al. (eds.), The Encyclopedia of Molecular Biology, published by Blackwell Science Ltd., 1994; and Robert A. Meyers (ed.), Molecular Biology and Biotechnology: a Comprehensive Desk Reference, published by VCH Publishers, Inc., 1995; and other similar references.

[0183] As used herein, the term “comprises” means “includes.” Thus, “comprising an antigen” means “including an antigen” without excluding other elements.

[0184] It is further to be understood that any and all base sizes or amino acid sizes, and all molecular weight or molecular mass values, given for nucleic acids or polypeptides are approximate, and are provided for descriptive purposes, unless otherwise indicated. Although many methods and materials similar or equivalent to those described herein can be used, particular suitable methods and materials are described below. In case of conflict, the present specification, including explanations of terms, will control. In addition, the materials, methods, and examples are illustrative only and not intended to be limiting.

[0185] To facilitate review of the various embodiments, the following explanations of terms are provided:

[0186] Administration: The introduction of a composition into a subject by a chosen route. Administration can be local or systemic. For example, if the chosen route is intravenous, the composition is administered by introducing the composition into a vein of the subject. In some examples a disclosed antibody specific for an HIV protein or polypeptide, or a nucleic acid encoding the antibody, is administered to a subject.

[0187] Agent: Any substance or any combination of substances that is useful for achieving an end or result; for example, a substance or combination of substances useful for inhibiting HIV infection in a subject. Agents include proteins, nucleic acid molecules, compounds, small molecules, organic compounds, inorganic compounds, or other molecules of interest. An agent can include a therapeutic agent (such as an anti-retroviral agent), a diagnostic agent or a pharmaceutical agent. In some embodiments, the agent is a polypeptide agent (such as a HIV-neutralizing antibody), or an anti-viral agent. The skilled artisan will understand that particular agents may be useful to achieve more than one result.

[0188] Amino acid substitution: The replacement of one amino acid in a polypeptide with a different amino acid.

[0189] Amplification: A technique that increases the number of copies of a nucleic acid molecule (such as an RNA or DNA). An example of amplification is the polymerase chain reaction, in which a biological sample is contacted with a pair of oligonucleotide primers, under conditions that allow for the hybridization of the primers to a nucleic acid template in the sample. The primers are extended under suitable conditions, dissociated from the template, and then re-annealed, extended, and dissociated to amplify the number of copies of the nucleic acid. The product of amplification can be characterized by electrophoresis, restriction endonuclease cleavage patterns, oligonucleotide hybridization or ligation, and/or nucleic acid sequencing using standard techniques. Other examples of amplification include strand displacement amplification, as disclosed in U.S. Pat. No. 5,744,311; transcription-free isothermal amplification, as disclosed in U.S. Pat. No. 6,033,881; repair chain reaction amplification, as disclosed in WO 90/01069; ligase chain reaction amplification, as disclosed in EP-A-320 308; gap filling ligase chain reaction amplification, as disclosed in U.S. Pat. No. 5,427,930; and NASBA™ RNA transcription-free amplification, as disclosed in U.S. Pat. No. 6,025,134.

[0190] Animal: Living multi-cellular vertebrate organisms, a category that includes, for example, mammals and birds. The term mammal includes both human and non-human mammals. Similarly, the term “subject” includes both human and veterinary subjects.

[0191] Antibody: A polypeptide substantially encoded by an immunoglobulin gene or immunoglobulin genes, or antigen binding fragments thereof, which specifically binds and recognizes an analyte (antigen) such as gp120 or an antigenic fragment of gp120. Immunoglobulin genes include the kappa, lambda, alpha, gamma, delta, epsilon and mu constant region genes, as well as the myriad immunoglobulin variable domain genes.

[0192] Antibodies exist, for example as intact immunoglobulins and as antigen binding fragments produced by digestion with various peptidases. For instance, Fabs, Fvs, and single-chain Fvs (scFvs) that specifically bind to gp120 or fragments of gp120 (that include the epitope bound by the originating antibody) would be gp120-specific binding agents. A scFv protein is a fusion protein in which a light chain variable domain of an immunoglobulin and a heavy chain variable domain of an immunoglobulin are bound by a linker, while in dsFvs, the chains have been mutated to introduce a disulfide bond to stabilize the association of the chains. The term also includes genetically engineered forms such as chimeric antibodies (such as humanized murine antibodies), heteroconjugate antibodies such as bispecific antibodies). See also, Pierce Catalog and Handbook, 1994-1995 (Pierce Chemical Co., Rockford, Ill.); Kuby, J., Immunology, 3^{rd} Ed., W.H. Freeman & Co., New York, 1997.

[0193] Examples of antigen-binding antibody fragments include: (1) Fab, the fragment which contains a monovalent antigen-binding fragment of an antibody molecule produced by digestion of whole antibody with the enzyme papain to yield an intact light chain and a portion of one heavy chain; (2) Fab′, the fragment of an antibody molecule obtained by treating whole antibody with pepsin, followed by reduction, to yield an intact light chain and a portion of the heavy chain; two Fab′ fragments are obtained per antibody molecule; (3) (Fab′)₂, the fragment of the antibody obtained by treating whole antibody with the enzyme pepsin without subsequent reduction; (4) F(ab′)₂, a dimer of two Fab′ fragments held together by two disulfide bonds; (5) Fv, a genetically engineered fragment containing the variable domain of the light chain and the variable domain of the heavy chain expressed as two chains; and (6) single chain antibody (“SCA”), a genetically engineered molecule containing the variable domain of the light chain, the variable domain of the heavy chain, linked by a suitable polypeptide linker as a genetically fused single chain molecule. The term “antibody,” as used herein, also includes antibody fragments either produced by the modification of whole antibodies or those synthesized de novo using recombinant DNA methodologies.

[0194] Typically, a naturally occurring immunoglobulin has heavy (H) chains and light (L) chains interconnected by disulfide bonds. There are two types of light chain, lambda (λ) and kappa (κ). There are five main heavy chain classes (or isotypes) which determine the functional activity of an antibody molecule: IgM, IgD, IgG, IgA and IgE.

[0195] Each heavy and light chain contains a constant region and a variable region, (the regions are also known as “domains”). In several embodiments, the heavy and the light chain variable domains combine to specifically bind the antigen. In additional embodiments, only the heavy chain variable domain is required. For example, naturally occurring camelid antibodies consisting of a heavy chain only are functional and stable in the absence of light chain (see, e.g., Hamers-Casterman et al., Nature, 363:446-448, 1993; Sheriff et al., Nat. Struct. Biol., 3:733-736, 1996). Light and heavy chain variable domains contain a “framework” region interrupted by three hypervariable regions, also called “complementarity-determining regions” or “CDRs” (see, e.g., Kabat et al., Sequences of Proteins of Immunological Interest, U.S. Department of Health and Human Services, 1991). The sequences of the framework regions of different light or heavy chains are relatively conserved within a species. The framework region of an antibody, that is the combined framework regions of the constituent light and heavy chains, serves to position and align the CDRs in three-dimensional space.

[0196] The CDRs are primarily responsible for binding to an epitope of an antigen. The amino acid sequence boundaries of a given CDR can be readily determined using any of a number of well-known schemes, including those described by Kabat et al. (“Sequences of Proteins of Immunological Interest,” 5th Ed. Public Health Service, National Institutes of Health, Bethesda, Md., 1991; “Kabat” numbering scheme), Al-Lazikani et al., (JMB 273,927-948, 1997; “Chothia” numbering scheme), and Lefranc et al. (“IMGT unique numbering for immunoglobulin and T cell receptor variable domains and Ig superfamily V-like domains,” Dev. Comp. Immunol., 27:55-77, 2003; “IMGT” numbering scheme).

[0197] The CDRs of each chain are typically referred to as CDR1, CDR2, and CDR3 (from the N-terminus to C-terminus), and are also typically identified by the chain in which the particular CDR is located. Thus, a V_{H} CDR3 is the CDR3 from the variable domain of the heavy chain of the antibody in which it is found, whereas a V_{L} CDR1 is the CDR1 from the variable domain of the light chain of the antibody in which it is found. Light chain CDRs are sometimes referred to as LCDR1, LCDR2, and LCDR3. Heavy chain CDRs are sometimes referred to as LCDR1, LCDR2, and LCDR3.

[0198] References to “V_{H}” or “VH” refer to the variable domain of an immunoglobulin heavy chain, including that of an antibody fragment, such as Fv, scFv, dsFv or Fab. References to “V_{L}” or “VL” refer to the variable domain of an immunoglobulin light chain, including that of an Fv, scFv, dsFv or Fab.

[0199] A “monoclonal antibody” is an antibody produced by a single clone of B-lymphocytes or by a cell into which the light and heavy chain genes of a single antibody have been transfected. Monoclonal antibodies are produced by methods known to those of skill in the art, for instance by making hybrid antibody-forming cells from a fusion of myeloma cells with immune spleen cells. These fused cells and their progeny are termed “hybridomas.” Monoclonal antibodies include humanized and fully human monoclonal antibodies. In some examples monoclonal antibodies are isolated from a subject. The amino acid sequences of such isolated monoclonal antibodies can be determined.

[0200] A “humanized” immunoglobulin is an immunoglobulin including a human framework region and one or more CDRs from a non-human (such as a mouse, rat, or synthetic) immunoglobulin. The non-human immunoglobulin providing the CDRs is termed a “donor,” and the human immunoglobulin providing the framework is termed an “acceptor.” In one embodiment, all the CDRs are from the donor immunoglobulin in a humanized immunoglobulin. Constant regions need not be present, but if they are, they must be substantially identical to human immunoglobulin constant regions, such as at least about 85-90%, such as about 95% or more identical. Hence, all parts of a humanized immunoglobulin, except possibly the CDRs, are substantially identical to corresponding parts of natural human immunoglobulin sequences. A “humanized antibody” is an antibody including a humanized light chain and a humanized heavy chain immunoglobulin. A humanized antibody binds to the same antigen as the donor antibody that provides the CDRs. The acceptor framework of a humanized immunoglobulin or antibody may have a limited number of substitutions by amino acids taken from the donor framework. Humanized or other monoclonal antibodies can have additional conservative amino acid substitutions, such as in the framework region, which have substantially no effect on antigen binding or other immunoglobulin functions. Humanized immunoglobulins can be constructed by means of genetic engineering (for example, see U.S. Pat. No. 5,585,089).

[0201] Antibody Scaffold: Refers to a heterologous protein that is engrafted with one or more CDRs from an antibody of interest on its surface. Transplantation of the CDRs can performed computationally in a manner that preserves its relevant structure and conformation. Mutations within the acceptor scaffold are made in order to accommodate the CDR graft.

[0202] Antibody Immunogenicity: A property of an antibody, whereby the antibody generates an immune response when administered to a subject, such as a human subject. In several embodiments, a disclosed antibody is not immunogenic or has low immunogenicity, for example, a disclosed antibody is not significantly more immunogenic compared to a standard control, or a reference antibody. Methods of determining the immunogenicity of an antibody are known to the person of ordinary skill in the art (see, e.g., Krieckaert et al., Current Opin Rheumatol., 24:306-311, 2012; Stas and Lasters, IDrugs, 12:169-173, 2009). In one non-limiting example, immunogenicity can be determined by assaying plasma or serum from a test subject using an ELISA against the antibody of interest.

[0203] Antibody self-reactivity or autoreactivity: A property of an antibody, whereby the antibody reacts with self-epitopes, that is epitopes of proteins and/or lipids that are produced by the subject. An antibody that does not have self-reactivity does not substantially bind to epitopes or lipids present on the membrane of a cell from a subject. Methods of determining if an antibody reacts with self epitopes are known to the person of ordinary skill in the art and described herein (for example, in Examples 1 and 8). In one example, antibody self reactivity is evaluated using an anti-cardiolipin assay or an anti-nuclear antigen (ANA) assay. The anti-ANA assay can include an anti-ANA LUMINEX® assay or an ANA cell-staining assay, for example. In several embodiments, a disclosed antibody is not self-reactive (or autoreactive), or is minimally self-reactive. In one non-limiting example, a disclosed antibody is not significantly more self-reactive compared to the VRC01 antibody, for example as measured using an anti-ANA LUMINEX® assay or an ANA cell-staining assay. In another non-limiting example, a disclosed antibody noes not have self reactivity above background levels, for example, as measured using an anti-ANA LUMINEX® assay or an ANA cell-staining assay.

[0204] Antigen: A polypeptide that can stimulate the production of antibodies or a T cell response in an animal, including polypeptides that are injected or absorbed into an animal. An antigen reacts with the products of specific humoral or cellular immunity, including those induced by heterologous antigens, such as the disclosed antigens. “Epitope” or “antigenic determinant” refers to the region of an antigen to which B and/or T cells respond. In one embodiment, T cells respond to the epitope, when the epitope is presented in conjunction with an MHC molecule. Epitopes can be formed both from contiguous amino acids or noncontiguous amino acids juxtaposed by tertiary folding of a protein. Epitopes formed from contiguous amino acids are typically retained on exposure to denaturing solvents whereas epitopes formed by tertiary folding are typically lost on treatment with denaturing solvents. An epitope typically includes at least 3, and more usually, at least 5, about 9, or about 8-10 amino acids in a unique spatial conformation. Methods of determining spatial conformation of epitopes include, for example, x-ray crystallography and nuclear magnetic resonance.

[0205] Immunogenic polypeptides and immunogenic peptides are non-limiting examples of antigens. In some examples, antigens include polypeptides derived from a pathogen of interest, such as a virus. An antigen that can stimulate the production of antibodies or a T cell response in a subject to a polypeptide expressed by a virus is a viral antigen. An “HIV antigen” can stimulate the production of antibodies or a T cell response in a subject to a polypeptide expressed by HIV. In some embodiments, an HIV antigen is a polypeptide expressed by HIV, such as HIV ENV, or a fragment thereof, such as gp120.

[0206] A “target epitope” is a specific epitope on an antigen that specifically binds an antibody of interest, such as a monoclonal antibody. In some examples, a target epitope includes the amino acid residues that contact the antibody of interest, such that the target epitope can be selected by the amino acid residues determined to be in contact with the antibody of interest.

[0207] Antigenic surface: A surface of a molecule, for example a protein such as a gp120 protein or polypeptide, capable of eliciting an immune response. An antigenic surface includes the defining features of that surface, for example the three-dimensional shape and the surface charge. An antigenic surface includes both surfaces that occur on gp120 polypeptides as well as surfaces of compounds that mimic the surface of a gp120 polypeptide (mimetics). In some examples, an antigenic surface includes all or part of the surface of gp120 that binds to the CD4 receptor.

[0208] Anti-retroviral agent: An agent that specifically inhibits a retrovirus from replicating or infecting cells. Non-limiting examples of antiretroviral drugs include entry inhibitors (e.g., enfuvirtide), CCR5 receptor antagonists (e.g., aplaviroc, vicriviroc, maraviroc), reverse transcriptase inhibitors (e.g., lamivudine, zidovudine, abacavir, tenofovir, emtricitabine, efavirenz), protease inhibitors (e.g., lopivar, ritonavir, raltegravir, darunavir, atazanavir), maturation inhibitors (e.g., alpha interferon, bevirimat and vivecon).

[0209] Anti-retroviral therapy (ART): A therapeutic treatment for HIV infection involving administration of at least one anti-retroviral agents (e.g., one, two, three or four anti-retroviral agents) to an HIV infected individual during a course of treatment. Non-limiting examples of antiretroviral agents include entry inhibitors (e.g., enfuvirtide), CCR5 receptor antagonists (e.g., aplaviroc, vicriviroc, maraviroc), reverse transcriptase inhibitors (e.g., lamivudine, zidovudine, abacavir, tenofovir, emtricitabine, efavirenz), protease inhibitors (e.g., lopivar, ritonavir, raltegravir, darunavir, atazanavir), maturation inhibitors (e.g., alpha interferon, bevirimat and vivecon). One example of an ART regimen includes treatment with a combination of tenofovir, emtricitabine and efavirenz. In some examples, ART includes Highly Active Anti-Retroviral Therapy (HAART).

[0210] Atomic Coordinates or Structure coordinates: Mathematical coordinates derived from mathematical equations related to the patterns obtained on diffraction of a monochromatic beam of X-rays by the atoms (scattering centers) such as an antigen, or an antigen in complex with an antibody. In some examples that antigen can be gp120, a gp120:antibody complex, or combinations thereof in a crystal. The diffraction data are used to calculate an electron density map of the repeating unit of the crystal. The electron density maps are used to establish the positions of the individual atoms within the unit cell of the crystal. In one example, the term “structure coordinates” refers to Cartesian coordinates derived from mathematical equations related to the patterns obtained on diffraction of a monochromatic beam of X-rays, such as by the atoms of a gp120 in crystal form.

[0211] Those of ordinary skill in the art understand that a set of structure coordinates determined by X-ray crystallography is not without standard error. For the purpose of this disclosure, any set of structure coordinates that have a root mean square deviation of protein backbone atoms (N, Cα, C and 0) of less than about 1.0 Angstroms when superimposed, such as about 0.75, or about 0.5, or about 0.25 Angstroms, using backbone atoms, shall (in the absence of an explicit statement to the contrary) be considered identical.

[0212] Binding affinity: Affinity of an antibody or antigen binding fragment thereof for an antigen. In one embodiment, affinity is calculated by a modification of the Scatchard method described by Frankel et al., Mol. Immunol., 16:101-106, 1979. In another embodiment, binding affinity is measured by an antigen/antibody dissociation rate. In yet another embodiment, a high binding affinity is measured by a competition radioimmunoassay. In several examples, a high binding affinity is at least about 1×10⁻⁸ M. In other embodiments, a high binding affinity is at least about 1.0×10⁻⁸, at least about 5.0×10⁻⁸, at least about 1.0×10⁻⁹, at least about 1.5×10⁻⁹, at least about 2.0×10⁻⁹, at least about 2.5×10⁻⁹, or at least about 3.0×10⁻⁹.

[0213] Bispecific antibody: A recombinant molecule composed of two different antigen binding domains that consequently bind to two different antigenic epitopes. Bispecific antibodies include chemically or genetically linked molecules of two antigen-binding domains. The antigen binding domains can be linked using a linker. The antigen binding domains can be monoclonal antibodies, antigen-binding fragments (e.g., Fab, scFv), eAds, bispecific single chain antibodies or combinations thereof. A bispecific antibody can include one or more constant domains, but does not necessarily include a constant domain. An example of a bispecific antibody is a bispecific single chain antibody including a scFv that specifically binds to gp120 joined (via a peptide linker) to a scFv that specifically binds to an antigen other than gp120. Another example is a bispecific antibody including a Fab that specifically binds to gp120 joined to a scFv that specifically binds to an antigen other than gp120.

[0214] CD4: Cluster of differentiation factor 4 polypeptide; a T-cell surface protein that mediates interaction with the MHC class II molecule. CD4 also serves as the primary receptor site for HIV on T-cells during HIV infection. CD4 is known to bind to gp120 from HIV. The known sequence of the CD4 precursor has a hydrophobic signal peptide, an extracellular region of approximately 370 amino acids, a highly hydrophobic stretch with significant identity to the membrane-spanning domain of the class II MHC beta chain, and a highly charged intracellular sequence of 40 resides (Maddon, Cell 42:93, 1985).

[0215] The term “CD4” includes polypeptide molecules that are derived from CD4 include fragments of CD4, generated either by chemical (for example enzymatic) digestion or genetic engineering means. Such a fragment may be one or more entire CD4 protein domains. The extracellular domain of CD4 consists of four contiguous immunoglobulin-like regions (D1, D2, D3, and D4, see Sakihama et al., Proc. Natl. Acad. Sci. 92:6444, 1995; U.S. Pat. No. 6,117,655), and amino acids 1 to 183 have been shown to be involved in gp120 binding. For instance, a binding molecule or binding domain derived from CD4 would include a sufficient portion of the CD4 protein to mediate specific and functional interaction between the binding fragment and a native or viral binding site of CD4. One such binding fragment includes both the D1 and D2 extracellular domains of CD4 (D1D2 is also a fragment of soluble CD4 or sCD4 which is comprised of D1 D2 D3 and D4), although smaller fragments may also provide specific and functional CD4-like binding. The gp120-binding site has been mapped to D1 of CD4.

[0216] CD4 polypeptides also include “CD4-derived molecules” which encompasses analogs (non-protein organic molecules), derivatives (chemically functionalized protein molecules obtained starting with the disclosed protein sequences) or mimetics (three-dimensionally similar chemicals) of the native CD4 structure, as well as proteins sequence variants or genetic alleles that maintain the ability to functionally bind to a target molecule.

[0217] CD4 binding site (CD4BS) antibodies: Antibodies that bind to or substantially overlap the CD4 binding surface of a gp120 polypeptide. The antibodies interfere with or prevent CD4 from binding to a gp120 polypeptide.

[0218] Chimeric antibody: An antibody which includes sequences derived from two different antibodies, such as from different species. In some examples, a chimeric antibody includes one or more CDRs and/or framework regions from one human antibody and CDRs and/or framework regions from another human antibody.

[0219] Clonal variant: Any sequence, which differs by one or more nucleotides or amino acids, in presence of V region with identical mutations compared to the germline, identical VDJ or VJ gene usage, and identical D and J length. The “germline” sequence is intended to be the sequence coding for the antibody/immunoglobulin (or of any fragment thereof) deprived of mutations, for example somatic mutations. The percentage of homology represents an indication of the mutational events which any type of heavy chain portion undergoes after contact with an antigen.

[0220] Conjugate: A complex of two molecules linked together, for example, linked together by a covalent bond. In one embodiment, an antibody is linked to an effector molecule; for example, an antibody that specifically binds to gp120 covalently linked to an effector molecule or to a toxin. The linkage can be by chemical or recombinant means. In one embodiment, the linkage is chemical, wherein a reaction between the antibody moiety and the effector molecule has produced a covalent bond formed between the two molecules to form one molecule. A peptide linker (short peptide sequence) can optionally be included between the antibody and the effector molecule. Because conjugates can be prepared from two molecules with separate functionalities, such as an antibody and an effector molecule, they are also sometimes referred to as “chimeric molecules.” In one embodiment, an antibody linked to an effector molecule is further joined to a lipid or other molecule to a protein or peptide to increase its half-life in the body.

[0221] Contacting: Placement in direct physical association; includes both in solid and liquid form, which can take place either in vivo or in vitro. Contacting includes contact between one molecule and another molecule, for example the amino acid on the surface of one polypeptide, such as an antigen, that contacts another polypeptide, such as an antibody. Contacting can also include contacting a cell for example by placing an antibody in direct physical association with a cell.

[0222] Control: A reference standard. In some embodiments, the control is a negative control, such as sample obtained from a healthy patient not infected with HIV. In other embodiments, the control is a positive control, such as a tissue sample obtained from a patient diagnosed with HIV infection. In still other embodiments, the control is a historical control or standard reference value or range of values (such as a previously tested control sample, such as a group of HIV patients with known prognosis or outcome, or group of samples that represent baseline or normal values).

[0223] A difference between a test sample and a control can be an increase or conversely a decrease. The difference can be a qualitative difference or a quantitative difference, for example a statistically significant difference. In some examples, a difference is an increase or decrease, relative to a control, of at least about 5%, such as at least about 10%, at least about 20%, at least about 30%, at least about 40%, at least about 50%, at least about 60%, at least about 70%, at least about 80%, at least about 90%, at least about 100%, at least about 150%, at least about 200%, at least about 250%, at least about 300%, at least about 350%, at least about 400%, or at least about 500%.

[0224] Cross complementation: Formation of an antibody including a heavy and light chain variable domains using a heavy chain variable domain of an antibody that specifically binds an epitope of an antigen of interest from first antibody and a light chain variable domain of an antibody that specifically binds the same epitope from a second antibody, wherein the antibody that is formed from the heavy chain variable domain and the light chain variable domain retains its ability to bind the epitope and wherein the first and the second antibodies are different antibodies. Thus, in cross complementation, the light chain variable domains and the heavy chain variable domains that form an antibody are from different sources, but the chimeric antibody that is formed still binds the epitope. In one embodiment, the antigen is gp120. In one embodiment an antibody that specifically binds to gp120 includes a heavy chain cross-complemented with a light chain, wherein the heavy chain includes the heavy chain variable domain of VRC07 (SEQ ID NO: 2) and the light chain includes the light chain variable domain of VRC01 (SEQ ID NO: 9).

[0225] Cytotoxicity: The toxicity of a molecule, such as an immunotoxin, to the cells intended to be targeted, as opposed to the cells of the rest of an organism. In one embodiment, in contrast, the term “toxicity” refers to toxicity of an immunotoxin to cells other than those that are the cells intended to be targeted by the targeting moiety of the immunotoxin, and the term “animal toxicity” refers to toxicity of the immunotoxin to an animal by toxicity of the immunotoxin to cells other than those intended to be targeted by the immunotoxin.

[0226] Detectable marker: A detectable molecule (also known as a label) that is conjugated directly or indirectly to a second molecule, such as an antibody, to facilitate detection of the second molecule. For example, the detectable marker can be capable of detection by ELISA, spectrophotometry, flow cytometry, microscopy or diagnostic imaging techniques (such as CT scans, MRIs, ultrasound, fiberoptic examination, and laparoscopic examination). Specific, non-limiting examples of detectable markers include fluorophores, fluorescent proteins, chemiluminescent agents, enzymatic linkages, radioactive isotopes and heavy metals or compounds (for example super paramagnetic iron oxide nanocrystals for detection by MRI). In one example, a “labeled antibody” refers to incorporation of another molecule in the antibody. For example, the label is a detectable marker, such as the incorporation of a radiolabeled amino acid or attachment to a polypeptide of biotinyl moieties that can be detected by marked avidin (for example, streptavidin containing a fluorescent marker or enzymatic activity that can be detected by optical or colorimetric methods). Various methods of labeling polypeptides and glycoproteins are known in the art and may be used. Examples of labels for polypeptides include, but are not limited to, the following: radioisotopes or radionuclides (such as ³⁵S or ¹³¹I) fluorescent labels (such as fluorescein isothiocyanate (FITC), rhodamine, lanthanide phosphors), enzymatic labels (such as horseradish peroxidase, beta-galactosidase, luciferase, alkaline phosphatase), chemiluminescent markers, biotinyl groups, predetermined polypeptide epitopes recognized by a secondary reporter (such as a leucine zipper pair sequences, binding sites for secondary antibodies, metal binding domains, epitope tags), or magnetic agents, such as gadolinium chelates. In some embodiments, labels are attached by spacer arms of various lengths to reduce potential steric hindrance. Methods for using detectable markers and guidance in the choice of detectable markers appropriate for various purposes are discussed for example in Sambrook et al. (Molecular Cloning: A Laboratory Manual, Cold Spring Harbor, N.Y., 1989) and Ausubel et al. (In Current Protocols in Molecular Biology, John Wiley & Sons, New York, 1998).

[0227] Detecting: To identify the existence, presence, or fact of something. General methods of detecting are known to the skilled artisan and may be supplemented with the protocols and reagents disclosed herein. For example, included herein are methods of detecting a cell that expresses gp120 in a subject.

[0228] DNA sequencing: The process of determining the nucleotide order of a given DNA molecule. The general characteristics of “deep sequencing” are that genetic material is amplified, such as by polymerase chain reaction, and then the amplified products are ligated to a solid surface. The sequence of the amplified target genetic material is then performed in parallel and the sequence information is captured by a computer. Generally, the sequencing can be performed using automated Sanger sequencing (AB13730x1 genome analyzer), pyrosequencing on a solid support (454 sequencing, Roche), sequencing-by-synthesis with reversible terminations (ILLUMINA® Genome Analyzer), sequencing-by-ligation (ABI SOLiD®) or sequencing-by-synthesis with virtual terminators (HELISCOPE®).

[0229] In some embodiments, DNA sequencing is performed using a chain termination method developed by Frederick Sanger, and thus termed “Sanger based sequencing” or “SBS.” This technique uses sequence-specific termination of a DNA synthesis reaction using modified nucleotide substrates. Extension is initiated at a specific site on the template DNA by using a short oligonucleotide primer complementary to the template at that region. The oligonucleotide primer is extended using DNA polymerase in the presence of the four deoxynucleotide bases (DNA building blocks), along with a low concentration of a chain terminating nucleotide (most commonly a di-deoxynucleotide). Limited incorporation of the chain terminating nucleotide by the DNA polymerase results in a series of related DNA fragments that are terminated only at positions where that particular nucleotide is present. The fragments are then size-separated by electrophoresis a polyacrylamide gel, or in a narrow glass tube (capillary) filled with a viscous polymer. An alternative to using a labeled primer is to use labeled terminators instead; this method is commonly called “dye terminator sequencing.”

[0230] “Pyrosequencing” is an array based method, which has been commercialized by 454 Life Sciences (Branford, Conn.). In some embodiments of the array-based methods, single-stranded DNA is annealed to beads and amplified via EmPCR®. These DNA-bound beads are then placed into wells on a fiber-optic chip along with enzymes that produce light in the presence of ATP. When free nucleotides are washed over this chip, light is produced as the PCR amplification occurs and ATP is generated when nucleotides join with their complementary base pairs. Addition of one (or more) nucleotide(s) results in a reaction that generates a light signal that is recorded, such as by the charge coupled device (CCD) camera, within the instrument. The signal strength is proportional to the number of nucleotides, for example, homopolymer stretches, incorporated in a single nucleotide flow.

[0231] Effector molecule: The portion of a chimeric molecule that is intended to have a desired effect on a cell or protein to which the chimeric molecule is targeted. Effector molecule is also known as an effector moiety, therapeutic agent, or diagnostic agent, or similar terms.

[0232] Epitope: An antigenic determinant. These are particular chemical groups or peptide sequences on a molecule that are antigenic, i.e. that elicit a specific immune response. An antibody specifically binds a particular antigenic epitope on a polypeptide. In some examples a disclosed antibody specifically binds to an epitope on the surface of gp120 from HIV.

[0233] Epitope Scaffold: Refers to a heterologous protein that is engrafted with a foreign epitope of interest on its surface. Transplantation of the epitope is performed computationally in a manner that preserves its relevant structure and conformation. Mutations within the acceptor scaffold are made in order to accommodate the epitope graft. The graft can be modified to represent the sequences of different clades and strains.

[0234] Fc polypeptide: The polypeptide including the constant region of an antibody excluding the first constant region immunoglobulin domain. Fc region generally refers to the last two constant region immunoglobulin domains of IgA, IgD, and IgG, and the last three constant region immunoglobulin domains of IgE and IgM. An Fc region may also include part or all of the flexible hinge N-terminal to these domains. For IgA and IgM, an Fc region may or may not include the tailpiece, and may or may not be bound by the J chain. For IgG, the Fc region includes immunoglobulin domains Cgamma2 and Cgamma3 (Cγ2 and Cγ3) and the lower part of the hinge between Cgamma1 (Cγ1) and Cγ2. Although the boundaries of the Fc region may vary, the human IgG heavy chain Fc region is usually defined to include residues C226 or P230 to its carboxyl-terminus, wherein the numbering is according to the EU index as in Kabat. For IgA, the Fc region includes immunoglobulin domains Calpha2 and Calpha3 (Cα2 and Cα3) and the lower part of the hinge between Calpha1 (Cα1) and Cα2. Encompassed within the definition of the Fc region are functionally equivalent analogs and variants of the Fc region. A functionally equivalent analog of the Fc region may be a variant Fc region, including one or more amino acid modifications relative to the wild-type or naturally existing Fc region. Variant Fc regions will possess at least 50% homology with a naturally existing Fc region, such as about 80%, and about 90%, or at least about 95% homology. Functionally equivalent analogs of the Fc region may include one or more amino acid residues added to or deleted from the N- or C-termini of the protein, such as no more than 30 or no more than 10 additions and/or deletions. Functionally equivalent analogs of the Fc region include Fc regions operably linked to a fusion partner. Functionally equivalent analogs of the Fc region must include the majority of all of the Ig domains that compose Fc region as defined above; for example IgG and IgA Fc regions as defined herein must include the majority of the sequence encoding CH₂ and the majority of the sequence encoding CH₃. Thus, the CH₂ domain on its own, or the CH₃ domain on its own, are not considered Fc region. The Fc region may refer to this region in isolation, or this region in the context of an Fc fusion polypeptide (immunoadhesin, see below).

[0235] Framework Region: Amino acid sequences interposed between CDRs. Includes variable light and variable heavy framework regions. The framework regions serve to hold the CDRs in an appropriate orientation for antigen binding.

[0236] gp120: An envelope protein from Human Immunodeficiency Virus (HIV). This envelope protein is initially synthesized as a longer precursor protein of 845-870 amino acids in size, designated gp160. gp160 is cleaved by a cellular protease into gp120 and gp41. gp120 contains most of the external, surface-exposed, domains of the HIV envelope glycoprotein complex, and it is gp120 which binds both to cellular CD4 receptors and to cellular chemokine receptors (such as CCR5).

[0237] The mature gp120 wildtype polypeptides have about 500 amino acids in the primary sequence. gp120 is heavily N-glycosylated giving rise to an apparent molecular weight of 120 kD. The polypeptide is comprised of five conserved regions (C1-C5) and five regions of high variability (V1-V5). Exemplary sequence of wt gp120 polypeptides are shown on GENBANK®, for example accession numbers AAB05604 and AAD12142 (as available on Oct. 16, 2009), incorporated by reference herein. It is understood that there are numerous variation in the sequence of gp120 from what is given in GENBANK®, for example accession numbers AAB05604 and AAD12142, and that these variants are skill recognized in the art as gp120.

[0238] The gp120 core has a molecular structure, which includes two domains: an “inner” domain (which faces gp41) and an “outer” domain (which is mostly exposed on the surface of the oligomeric envelope glycoprotein complex). The two gp120 domains are separated by a “bridging sheet” that is not part of either domain. The gp120 core includes 25 beta strands, 5 alpha helices, and 10 defined loop segments.

[0239] The third variable domain referred to herein as the V3 loop is a loop of about 35 amino acids critical for the binding of the co-receptor and determination of which of the co-receptors will bind. In certain examples the V3 loop includes residues 296-331.

[0240] HIV Envelope protein (Env): The HIV envelope protein is initially synthesized as a longer precursor protein of 845-870 amino acids in size, designated gp160. gp160 forms a homotrimer and undergoes glycosylation within the Golgi apparatus. In vivo, it is then cleaved by a cellular protease into gp120 and gp41. gp120 contains most of the external, surface-exposed, domains of the HIV envelope glycoprotein complex, and it is gp120 which binds both to cellular CD4 receptors and to cellular chemokine receptors (such as CCR5). gp41 contains a transmembrane domain and remains in a trimeric configuration; it interacts with gp120 in a non-covalent manner.

[0241] Host cells: Cells in which a vector can be propagated and its DNA expressed, for example a disclosed antibody can be expressed in a host cell. The cell may be prokaryotic or eukaryotic. The term also includes any progeny of the subject host cell. It is understood that all progeny may not be identical to the parental cell since there may be mutations that occur during replication. However, such progeny are included when the term “host cell” is used.

[0242] Human Immunodeficiency Virus (HIV): A retrovirus that causes immunosuppression in humans (HIV disease), and leads to a disease complex known as the acquired immunodeficiency syndrome (AIDS). “HIV disease” refers to a well-recognized constellation of signs and symptoms (including the development of opportunistic infections) in persons who are infected by an HIV virus, as determined by antibody or western blot studies. Laboratory findings associated with this disease include a progressive decline in T cells. HIV includes HIV type 1 (HIV-1) and HIV type 2 (HIV-2). Related viruses that are used as animal models include simian immunodeficiency virus (SIV), and feline immunodeficiency virus (FIV). Treatment of HIV-1 with HAART has been effective in reducing the viral burden and ameliorating the effects of HIV-1 infection in infected individuals.

[0243] HXB2 numbering system: A reference numbering system for HIV protein and nucleic acid sequences, using HIV-1 HXB2 strain sequences as a reference for all other HIV strain sequences. The person of ordinary skill in the art is familiar with the HXB2 numbering system, and this system is set forth in “Numbering Positions in HIV Relative to HXB2CG,” Bette Korber et al., Human Retroviruses and AIDS 1998: A Compilation and Analysis of Nucleic Acid and Amino Acid Sequences. Korber B, Kuiken C L, Foley B, Hahn B, McCutchan F, Mellors J W, and Sodroski J, Eds. Theoretical Biology and Biophysics Group, Los Alamos National Laboratory, Los Alamos, N. Mex., which is incorporated by reference herein in its entirety. HXB2 is also known as: HXBc2, for HXB clone 2; HXB2R, in the Los Alamos HIV database, with the R for revised, as it was slightly revised relative to the original HXB2 sequence; and HXB2CG in GENBANK™, for HXB2 complete genome. The numbering used in gp120 polypeptides disclosed herein is relative to the HXB2 numbering scheme.

[0244] IgA: A polypeptide belonging to the class of antibodies that are substantially encoded by a recognized immunoglobulin alpha gene. In humans, this class or isotype includes IgA₁ and IgA₂. IgA antibodies can exist as monomers, polymers (referred to as pIgA) of predominantly dimeric form, and secretory IgA. The constant chain of wild-type IgA contains an 18-amino-acid extension at its C-terminus called the tail piece (tp). Polymeric IgA is secreted by plasma cells with a 15-kDa peptide called the J chain linking two monomers of IgA through the conserved cysteine residue in the tail piece.

[0245] IgG: A polypeptide belonging to the class or isotype of antibodies that are substantially encoded by a recognized immunoglobulin gamma gene. In humans, this class includes IgG1, IgG₂, IgG₃, and IgG₄. In mice, this class includes Ig IgG₃.

[0246] Immune complex: The binding of antibody to a soluble antigen forms an immune complex. The formation of an immune complex can be detected through conventional methods known to the skilled artisan, for instance immunohistochemistry, immunoprecipitation, flow cytometry, immunofluorescence microscopy, ELISA, immunoblotting (for example, Western blot), magnetic resonance imaging, CT scans, X-ray and affinity chromatography. Immunological binding properties of selected antibodies may be quantified using methods well known in the art.

[0247] Immunoadhesin: A molecular fusion of a protein with the Fc region of an immunoglobulin, wherein the immunoglobulin retains specific properties, such as Fc receptor binding and increased half-life. An Fc fusion combines the Fc region of an immunoglobulin with a fusion partner, which in general can be any protein, polypeptide, peptide, or small molecule. In one example, and immunoadhesin includes the hinge, CH₂, and CH₃ domains of the immunoglobulin gamma 1 heavy chain constant region. In another example, the immunoadhesin includes the CH₂, and CH₃ domains of an IgG.

[0248] Immunogen: A compound, composition, or substance (for example, a protein or a portion thereof) that is capable of inducing an immune response in a mammal, such as a mammal infected or at risk of infection with a pathogen. Administration of an immunogen can lead to protective immunity and/or proactive immunity against a pathogen of interest. In some examples, an immunogen is an HIV antigen. Examples of immunogens include, but are not limited to, peptides, lipids, polysaccharides, combinations thereof, and nucleic acids containing antigenic determinants, such as those recognized by an immune cell. In some examples, immunogens include peptides derived from a pathogen of interest. Exemplary pathogens include bacteria, fungi, viruses and parasites. In specific examples, an immunogen is derived from HIV, such as a gp120 polypeptide derived from HIV or antigenic fragment thereof.

[0249] Immunological Probe: A molecule that can be used for selection of antibodies from sera which are directed against a specific epitope, including from human patient sera. The epitope scaffolds, along with related point mutants, can be used as immunological probes in both positive and negative selection of antibodies against the epitope graft. In some examples immunological probes are engineered variants of gp120.

[0250] Immunologically reactive conditions: Includes reference to conditions which allow an antibody raised against a particular epitope to bind to that epitope to a detectably greater degree than, and/or to the substantial exclusion of, binding to substantially all other epitopes. Immunologically reactive conditions are dependent upon the format of the antibody binding reaction and typically are those utilized in immunoassay protocols or those conditions encountered in vivo. See Harlow & Lane, supra, for a description of immunoassay formats and conditions. The immunologically reactive conditions employed in the methods are “physiological conditions” which include reference to conditions (e.g., temperature, osmolarity, pH) that are typical inside a living mammal or a mammalian cell. While it is recognized that some organs are subject to extreme conditions, the intra-organismal and intracellular environment normally lies around pH 7 (e.g., from pH 6.0 to pH 8.0, more typically pH 6.5 to 7.5), contains water as the predominant solvent, and exists at a temperature above 0° C. and below 50° C. Osmolarity is within the range that is supportive of cell viability and proliferation.

[0251] Inhibiting or treating a disease: Inhibiting the full development of a disease or condition, for example, in a subject who is at risk for a disease such as acquired immunodeficiency syndrome (AIDS). “Treatment” refers to a therapeutic intervention that ameliorates a sign or symptom of a disease or pathological condition after it has begun to develop. The term “ameliorating,” with reference to a disease or pathological condition, refers to any observable beneficial effect of the treatment. The beneficial effect can be evidenced, for example, by a delayed onset of clinical symptoms of the disease in a susceptible subject, a reduction in severity of some or all clinical symptoms of the disease, a slower progression of the disease, a reduction in the viral load, an improvement in the overall health or well-being of the subject, or by other parameters well known in the art that are specific to the particular disease. A “prophylactic” treatment is a treatment administered to a subject who does not exhibit signs of a disease or exhibits only early signs for the purpose of decreasing the risk of developing pathology.

[0252] Isolated: An “isolated” biological component (such as a cell, for example a B cell, a nucleic acid, peptide, protein or antibody) has been substantially separated, produced apart from, or purified away from other biological components in the cell of the organism in which the component naturally occurs, such as, other chromosomal and extrachromosomal DNA and RNA, and proteins. Nucleic acids, peptides and proteins which have been “isolated” thus include nucleic acids and proteins purified by standard purification methods. The term also embraces nucleic acids, peptides, and proteins prepared by recombinant expression in a host cell as well as chemically synthesized nucleic acids. In some examples an antibody, such as an antibody specific for gp120 can be isolated, for example isolated from a subject infected with HIV.

[0253] K_{d}: The dissociation constant for a given interaction, such as a polypeptide ligand interaction or an antibody antigen interaction. For example, for the bimolecular interaction of an antibody (such as VRC07 or variant thereof as disclosed herein) and an antigen (such as gp120) it is the concentration of the individual components of the bimolecular interaction divided by the concentration of the complex.

[0254] Label: A detectable compound or composition that is conjugated directly or indirectly to another molecule, such as an antibody or a protein, to facilitate detection of that molecule. Specific, non-limiting examples of labels include fluorescent tags, enzymatic linkages, and radioactive isotopes. In some examples, a disclosed antibody is labeled.

[0255] Linker: A bi-functional molecule that can be used to link two molecules into one contiguous molecule, for example, to link an effector molecule to an antibody. In some embodiments, a conjugate includes a linker between the effector molecule or detectable marker and an antibody. In some embodiments, the linker is cleavable under intracellular conditions, such that cleavage of the linker releases the effector molecule or detectable marker from the antibody in the intracellular environment. In yet other embodiments, the linker is not cleavable and the effector molecule or detectable marker can be released, for example, by antibody degradation. In some cases, a linker is a peptide within an antibody binding fragment (such as an Fv fragment) which serves to indirectly bond the variable heavy chain to the variable light chain.

[0256] In several embodiments, the terms “conjugating,” “joining,” “bonding” or “linking” refer to making two polypeptides into one contiguous polypeptide molecule, to covalently attaching a radionuclide or other molecule to a polypeptide, such as an antibody that specifically binds gp120, or an antibody binding fragment thereof. In the specific context, the terms include reference to joining a ligand, such as an antibody moiety, to an effector molecule. The linkage can be either by chemical or recombinant means. “Chemical means” refers to a reaction between the antibody moiety and the effector molecule such that there is a covalent bond formed between the two molecules to form one molecule.

[0257] Neutralizing antibody: An antibody which reduces the infectious titer of an infectious agent by binding to a specific antigen on the infectious agent. In some examples the infectious agent is a virus. In some examples, an antibody that is specific for gp120 neutralizes the infectious titer of HIV. A “broadly neutralizing antibody” is an antibody that binds to and inhibits the function of related antigens, such as antigens that share at least 85%, 90%, 95%, 96%, 97%, 98% or 99% identity with antigenic surface of the antigen. With regard to an antigen from a pathogen, such as a virus, the antibody can bind to and inhibit the function of an antigen from more than one class and/or subclass of the pathogen. For example, with regard to a human immunodeficiency virus, the antibody can bind to and inhibit the function of an antigen, such as gp120 from more than one Glade. In one embodiment, broadly neutralizing antibodies to HIV are distinct from other antibodies to HIV in that they neutralize a high percentage of the many types of HIV in circulation.

[0258] Nucleic acid: A polymer composed of nucleotide units (ribonucleotides, deoxyribonucleotides, related naturally occurring structural variants, and synthetic non-naturally occurring analogs thereof) linked via phosphodiester bonds, related naturally occurring structural variants, and synthetic non-naturally occurring analogs thereof. Thus, the term includes nucleotide polymers in which the nucleotides and the linkages between them include non-naturally occurring synthetic analogs, such as, for example and without limitation, phosphorothioates, phosphoramidates, methyl phosphonates, chiral-methyl phosphonates, 2-O-methyl ribonucleotides, peptide-nucleic acids (PNAs), and the like. Such polynucleotides can be synthesized, for example, using an automated DNA synthesizer. The term “oligonucleotide” typically refers to short polynucleotides, generally no greater than about 50 nucleotides. It will be understood that when a nucleotide sequence is represented by a DNA sequence (i.e., A, T, G, C), this also includes an RNA sequence (i.e., A, U, G, C) in which “U” replaces “T.”

[0259] Conventional notation is used herein to describe nucleotide sequences: the left-hand end of a single-stranded nucleotide sequence is the 5′-end; the left-hand direction of a double-stranded nucleotide sequence is referred to as the 5′-direction. The direction of 5′ to 3′ addition of nucleotides to nascent RNA transcripts is referred to as the transcription direction. The DNA strand having the same sequence as an mRNA is referred to as the “coding strand;” sequences on the DNA strand having the same sequence as an mRNA transcribed from that DNA and which are located 5′ to the 5′-end of the RNA transcript are referred to as “upstream sequences;” sequences on the DNA strand having the same sequence as the RNA and which are 3′ to the 3′ end of the coding RNA transcript are referred to as “downstream sequences.”

[0260] “cDNA” refers to a DNA that is complementary or identical to an mRNA, in either single stranded or double stranded form.

[0261] “Encoding” refers to the inherent property of specific sequences of nucleotides in a polynucleotide, such as a gene, a cDNA, or an mRNA, to serve as templates for synthesis of other polymers and macromolecules in biological processes having either a defined sequence of nucleotides (i.e., rRNA, tRNA and mRNA) or a defined sequence of amino acids and the biological properties resulting therefrom. Thus, a gene encodes a protein if transcription and translation of mRNA produced by that gene produces the protein in a cell or other biological system. Both the coding strand, the nucleotide sequence of which is identical to the mRNA sequence and is usually provided in sequence listings, and non-coding strand, used as the template for transcription, of a gene or cDNA can be referred to as encoding the protein or other product of that gene or cDNA. Unless otherwise specified, a “nucleotide sequence encoding an amino acid sequence” includes all nucleotide sequences that are degenerate versions of each other and that encode the same amino acid sequence. Nucleotide sequences that encode proteins and RNA may include introns.

[0262] “Recombinant nucleic acid” refers to a nucleic acid having nucleotide sequences that are not naturally joined together. his includes nucleic acid vectors including an amplified or assembled nucleic acid which can be used to transform a suitable host cell. A host cell that includes the recombinant nucleic acid is referred to as a “recombinant host cell.” The gene is then expressed in the recombinant host cell to produce, e.g., a “recombinant polypeptide.” A recombinant nucleic acid may serve a non-coding function (e.g., promoter, origin of replication, ribosome-binding site, etc.) as well.

[0263] A first sequence is an “antisense” with respect to a second sequence if a polynucleotide whose sequence is the first sequence specifically hybridizes with a polynucleotide whose sequence is the second sequence.

[0264] Terms used to describe sequence relationships between two or more nucleotide sequences or amino acid sequences include “reference sequence,” “selected from,” “comparison window,” “identical,” “percentage of sequence identity,” “substantially identical,” “complementary,” and “substantially complementary.”

[0265] For sequence comparison of nucleic acid sequences, typically one sequence acts as a reference sequence, to which test sequences are compared. When using a sequence comparison algorithm, test and reference sequences are entered into a computer, subsequence coordinates are designated, if necessary, and sequence algorithm program parameters are designated. Default program parameters are used. Methods of alignment of sequences for comparison are well known in the art. Optimal alignment of sequences for comparison can be conducted, e.g., by the local homology algorithm of Smith & Waterman, Adv. Appl. Math. 2:482, 1981, by the homology alignment algorithm of Needleman & Wunsch, J. Mol. Biol. 48:443, 1970, by the search for similarity method of Pearson & Lipman, Proc. Nat'l. Acad. Sci. USA 85:2444, 1988, by computerized implementations of these algorithms (GAP, BESTFIT, FASTA, and TFASTA in the Wisconsin Genetics Software Package, Genetics Computer Group, 575 Science Dr., Madison, Wis.), or by manual alignment and visual inspection (see, e.g., Current Protocols in Molecular Biology (Ausubel et al., eds 1995 supplement)).

[0266] One example of a useful algorithm is PILEUP. PILEUP uses a simplification of the progressive alignment method of Feng & Doolittle, J. Mol. Evol. 35:351-360, 1987. The method used is similar to the method described by Higgins & Sharp, CABIOS 5:151-153, 1989. Using PILEUP, a reference sequence is compared to other test sequences to determine the percent sequence identity relationship using the following parameters: default gap weight (3.00), default gap length weight (0.10), and weighted end gaps. PILEUP can be obtained from the GCG sequence analysis software package, e.g., version 7.0 (Devereaux et al., Nuc. Acids Res. 12:387-395, 1984.

[0267] Another example of algorithms that are suitable for determining percent sequence identity and sequence similarity are the BLAST and the BLAST 2.0 algorithm, which are described in Altschul et al., J. Mol. Biol. 215:403-410, 1990 and Altschul et al., Nucleic Acids Res. 25:3389-3402, 1977. Software for performing BLAST analyses is publicly available through the National Center for Biotechnology Information (ncbi.nlm.nih.gov). The BLASTN program (for nucleotide sequences) uses as defaults a word length (W) of [1, alignments (B) of 50, expectation (E) of 10, M=5, N=−4, and a comparison of both strands. The BLASTP program (for amino acid sequences) uses as defaults a word length (W) of 3, and expectation (E) of 10, and the BLOSUM62 scoring matrix (see Henikoff & Henikoff, Proc. Natl. Acad. Sci. USA 89:10915, 1989). An oligonucleotide is a linear polynucleotide sequence of up to about 100 nucleotide bases in length.

[0268] A polynucleotide or nucleic acid sequence refers to a polymeric form of nucleotide at least 10 bases in length. A recombinant polynucleotide includes a polynucleotide that is not immediately contiguous with both of the coding sequences with which it is immediately contiguous (one on the 5′ end and one on the 3′ end) in the naturally occurring genome of the organism from which it is derived. The term therefore includes, for example, a recombinant DNA which is incorporated into a vector; into an autonomously replicating plasmid or virus; or into the genomic DNA of a prokaryote or eukaryote, or which exists as a separate molecule (e.g., a cDNA) independent of other sequences. The nucleotides can be ribonucleotides, deoxyribonucleotides, or modified forms of either nucleotide. The term includes single- and double-stranded forms of DNA. A gp120 polynucleotide is a nucleic acid encoding a gp120 polypeptide.

[0269] Operably linked: A first nucleic acid sequence is operably linked with a second nucleic acid sequence when the first nucleic acid sequence is placed in a functional relationship with the second nucleic acid sequence. For instance, a promoter, such as the CMV promoter, is operably linked to a coding sequence if the promoter affects the transcription or expression of the coding sequence. Generally, operably linked DNA sequences are contiguous and, where necessary to join two protein-coding regions, in the same reading frame.

[0270] Pharmaceutically acceptable carriers: The pharmaceutically acceptable carriers of use are conventional. Remington's Pharmaceutical Sciences, by E. W. Martin, Mack Publishing Co., Easton, Pa., 19th Edition, 1995, describes compositions and formulations suitable for pharmaceutical delivery of the disclosed antibodies.

[0271] In general, the nature of the carrier will depend on the particular mode of administration being employed. For instance, parenteral formulations usually include injectable fluids that include pharmaceutically and physiologically acceptable fluids such as water, physiological saline, balanced salt solutions, aqueous dextrose, glycerol or the like as a vehicle. For solid compositions (e.g., powder, pill, tablet, or capsule forms), conventional non-toxic solid carriers can include, for example, pharmaceutical grades of mannitol, lactose, starch, or magnesium stearate. In addition to biologically neutral carriers, pharmaceutical compositions to be administered can contain minor amounts of non-toxic auxiliary substances, such as wetting or emulsifying agents, preservatives, and pH buffering agents and the like, for example sodium acetate or sorbitan monolaurate.

[0272] Pharmaceutical agent: A chemical compound or composition capable of inducing a desired therapeutic or prophylactic effect when properly administered to a subject or a cell. In some examples a pharmaceutical agent includes one or more of the disclosed antibodies.

[0273] Polypeptide: Any chain of amino acids, regardless of length or post-translational modification (e.g., glycosylation or phosphorylation). In one embodiment, the polypeptide is gp120 polypeptide. In one embodiment, the polypeptide is a disclosed antibody or a fragment thereof. A “residue” refers to an amino acid or amino acid mimetic incorporated in a polypeptide by an amide bond or amide bond mimetic. A polypeptide has an amino terminal (N-terminal) end and a carboxy-terminal end.

[0274] Promoter: A promoter is an array of nucleic acid control sequences that directs transcription of a nucleic acid. A promoter includes necessary nucleic acid sequences near the start site of transcription, for example, in the case of a polymerase II type promoter, a TATA element. A promoter also optionally includes distal enhancer or repressor elements which can be located as much as several thousand base pairs from the start site of transcription. Both constitutive and inducible promoters are included (see for example, Bitter et al., Methods in Enzymology 153:516-544, 1987).

[0275] Specific, non-limiting examples of promoters include promoters derived from the genome of mammalian cells (such as the metallothionein promoter) or from mammalian viruses (such as the retrovirus long terminal repeat; the adenovirus late promoter; the vaccinia virus 7.5K promoter) may be used. Promoters produced by recombinant DNA or synthetic techniques may also be used. A polynucleotide can be inserted into an expression vector that contains a promoter sequence which facilitates the efficient transcription of the inserted genetic sequence of the host. The expression vector typically contains an origin of replication, a promoter, as well as specific nucleic acid sequences that allow phenotypic selection of the transformed cells.

[0276] Purified: The term purified does not require absolute purity; rather, it is intended as a relative term. Thus, for example, a purified peptide preparation is one in which the peptide or protein (such as an antibody) is more enriched than the peptide or protein is in its natural environment within a cell. In one embodiment, a preparation is purified such that the protein or peptide represents at least 50% of the total peptide or protein content of the preparation.

[0277] Recombinant: A recombinant nucleic acid is one that has a sequence that is not naturally occurring or has a sequence that is made by an artificial combination of two otherwise separated segments of sequence. This artificial combination is often accomplished by chemical synthesis or, more commonly, by the artificial manipulation of isolated segments of nucleic acids, e.g., by genetic engineering techniques.

[0278] Sequence identity: The similarity between amino acid sequences is expressed in terms of the similarity between the sequences, otherwise referred to as sequence identity. Sequence identity is frequently measured in terms of percentage identity (or similarity or homology); the higher the percentage, the more similar the two sequences are. Homologs or variants of a polypeptide will possess a relatively high degree of sequence identity when aligned using standard methods.

[0279] Methods of alignment of sequences for comparison are well known in the art. Various programs and alignment algorithms are described in: Smith and Waterman, Adv. Appl. Math. 2:482, 1981; Needleman and Wunsch, J. Mol. Biol. 48:443, 1970; Pearson and Lipman, Proc. Natl. Acad. Sci. U.S.A. 85:2444, 1988; Higgins and Sharp, Gene 73:237, 1988; Higgins and Sharp, CABIOS 5:151, 1989; Corpet et al., Nucleic Acids Research 16:10881, 1988; and Pearson and Lipman, Proc. Natl. Acad. Sci. U.S.A. 85:2444, 1988. Altschul et al., Nature Genet. 6:119, 1994, presents a detailed consideration of sequence alignment methods and homology calculations.

[0280] The NCBI Basic Local Alignment Search Tool (BLAST) (Altschul et al., J. Mol. Biol. 215:403, 1990) is available from several sources, including the National Center for Biotechnology Information (NCBI, Bethesda, Md.) and on the internet, for use in connection with the sequence analysis programs blastp, blastn, blastx, tblastn and tblastx. A description of how to determine sequence identity using this program is available on the NCBI website on the internet.

[0281] Homologs and variants of a V_{L} or a V_{H} of an antibody that specifically binds a polypeptide are typically characterized by possession of at least about 75%, for example at least about 80%, 85%, 90%, 91%, 92%, 93%, 94%, 95%, 96%, 97%, 98% or 99% sequence identity counted over the full length alignment with the amino acid sequence of interest. Proteins with even greater similarity to the reference sequences will show increasing percentage identities when assessed by this method, such as at least 80%, at least 85%, at least 90%, at least 95%, at least 98%, or at least 99% sequence identity. When less than the entire sequence is being compared for sequence identity, homologs and variants will typically possess at least 80% sequence identity over short windows of 10-20 amino acids, and may possess sequence identities of at least 85% or at least 90% or 95% depending on their similarity to the reference sequence. Methods for determining sequence identity over such short windows are available at the NCBI website on the internet. One of skill in the art will appreciate that these sequence identity ranges are provided for guidance only; it is entirely possible that strongly significant homologs could be obtained that fall outside of the ranges provided.

[0282] Specifically bind: When referring to an antibody, refers to a binding reaction which determines the presence of a target protein, peptide, or polysaccharide in the presence of a heterogeneous population of proteins and other biologics. Thus, under designated conditions, an antibody binds preferentially to a particular target protein, peptide or polysaccharide (such as an antigen present on the surface of a pathogen, for example gp120) and does not bind in a significant amount to other proteins or polysaccharides present in the sample or subject. Specific binding can be determined by methods known in the art. With reference to an antibody antigen complex, specific binding of the antigen and antibody has a K_{d} of less than about 10⁻⁶ Molar, such as less than about 10⁻⁶ Molar, 10⁻⁷ Molar, 10⁻⁸ Molar, 10⁻⁹, or even less than about 10¹⁰ Molar.

[0283] T Cell: A white blood cell critical to the immune response. T cells include, but are not limited to, CD4⁺ T cells and CD8⁺ T cells. A CD4⁺ T lymphocyte is an immune cell that carries a marker on its surface known as “cluster of differentiation 4” (CD4). These cells, also known as helper T cells, help orchestrate the immune response, including antibody responses as well as killer T cell responses. CD8⁺ T cells carry the “cluster of differentiation 8” (CD8) marker. In one embodiment, a CD8 T cells is a cytotoxic T lymphocytes. In another embodiment, a CD8 cell is a suppressor T cell.

[0284] Therapeutic agent: Used in a generic sense, it includes treating agents, prophylactic agents, and replacement agents. A therapeutic agent is used to ameliorate a specific set of conditions in a subject with a disease or a disorder.

[0285] Therapeutically effective amount: A quantity of a specific substance, such as a disclosed antibody, sufficient to achieve a desired effect in a subject being treated. For instance, this can be the amount necessary to inhibit HIV replication or treat HIV infection. In several embodiments, a therapeutically effective amount is the amount necessary to reduce a sign or symptom of HIV infection, and/or to decrease viral titer in a subject. When administered to a subject, a dosage will generally be used that will achieve target tissue concentrations that has been shown to achieve a desired in vitro effect.

[0286] Toxin: An effector molecule that induces cytotoxicity when it contacts a cell. Specific, non-limiting examples of toxins include, but are not limited to, abrin, ricin, auristatins (such as monomethyl auristatin E (MMAE; see for example, Francisco et al., Blood, 102: 1458-1465, 2003)) and monomethyl auristatin F (MMAF; see, for example, Doronina et al., BioConjugate Chem., 17: 114-124, 2006), maytansinoids (such as DM1; see, for example, Phillips et al., Cancer Res., 68:9280-9290, 2008), Pseudomonas exotoxin (PE, such as PE35, PE37, PE38, and PE40), diphtheria toxin (DT), botulinum toxin, saporin, restrictocin or gelonin, or modified toxins thereof, or other toxic agents that directly or indirectly inhibit cell growth or kill cells. For example, PE and DT are highly toxic compounds that typically bring about death through liver toxicity. PE and DT, however, can be modified into a form for use as an immunotoxin by removing the native targeting component of the toxin (such as the domain Ia of PE and the B chain of DT) and replacing it with a different targeting moiety, such as an antibody.

[0287] Under conditions sufficient for: A phrase that is used to describe any environment that permits a desired activity. In one example the desired activity is formation of an immune complex. In particular examples the desired activity is treatment of HIV infection.

[0288] Vector: A nucleic acid molecule as introduced into a host cell, thereby producing a transformed host cell. A vector may include nucleic acid sequences that permit it to replicate in a host cell, such as an origin of replication. A vector may also include one or more selectable marker genes and other genetic elements known in the art.

[0289] Virus: Microscopic infectious organism that reproduces inside living cells. A virus consists essentially of a core of a single nucleic acid surrounded by a protein coat, and has the ability to replicate only inside a living cell. “Viral replication” is the production of additional virus by the occurrence of at least one viral life cycle. A virus may subvert the host cells' normal functions, causing the cell to behave in a manner determined by the virus. For example, a viral infection may result in a cell producing a cytokine, or responding to a cytokine, when the uninfected cell does not normally do so.

[0290] “Retroviruses” are RNA viruses wherein the viral genome is RNA. When a host cell is infected with a retrovirus, the genomic RNA is reverse transcribed into a DNA intermediate which is integrated very efficiently into the chromosomal DNA of infected cells. The integrated DNA intermediate is referred to as a provirus. The term “lentivirus” is used in its conventional sense to describe a genus of viruses containing reverse transcriptase. The lentiviruses include the “immunodeficiency viruses” which include human immunodeficiency virus (HIV) type 1 and type 2 (HIV-I and HIV-II), simian immunodeficiency virus (SIV), and feline immunodeficiency virus (FIV).

[0291] VRC01: A monoclonal antibody that specifically binds to gp120 and is neutralizes a broad range of HIV viruses, wherein the sequences of the heavy and light chain variable domains of VRC01 are set forth herein as SEQ ID NO: 5 and SEQ ID NO: 9, respectively. See also, Wu et al., Science, 329(5993):856-861, 2010, and PCT publication WO2012/154312, incorporated by reference herein in its entirety.

[0292] VRC01-like antibody, heavy chain or light chain: A VRC01-like antibody or a heavy chain or light chain that can complement with a corresponding heavy chain or light chain from VRC01, as specifically defined herein. VRC01-like antibodies, and methods for identifying and producing these antibodies, are disclosed herein. Generally, these antibodies bind to the CD4 binding surface of gp120 in substantially the same orientation as VRC01, and are broadly neutralizing VRC01-like antibodies mimic the binding of CD4 to gp120 with several of the important contacts between CD4 and gp120 mimicked by the VRC01-like antibodies.

[0293] In some embodiments, a VRC07 or VRC07 variant heavy chain variable domain disclosed herein can be included on a heavy chain and cross-complemented with a light chain including a variable domain of a VRC01 like antibody, such as VRC-PG04, VRC-PG04b, VRC-CH30, VRC-CH31, VRC-CH32, VRC-CH33, VRC-CH34, VRC01, VRC02, VRC03, NIH4546, NIH4546 G54W, 3BNC60, 3BNC117, 12A12, 12A21, 1NC9, 1B2530, 8ANC131 or 8ANC134, and maintain high binding affinity for gp120. In further embodiments, a VRC01 variant light chain variable domain disclosed herein can be included on a light chain and cross-complemented with a heavy chain including a variable domain of a VRC01 like antibody, such as VRC-PG04, VRC-PG04b, VRC-CH30, VRC-CH31, VRC-CH32, VRC-CH33, VRC-CH34, VRC01, VRC02, VRC03, NIH4546, NIH4546 G54W, 3BNC60, 3BNC117, 12A12, 12A21, 1NC9, 1B2530, 8ANC131 or 8ANC134, and maintain high binding affinity for gp120.

[0294] Several VRC01-like antibodies are available, including:

[0295] VRC01-like antibodies, heavy chains and light chains disclosed in PCT International Application No. PCT/US2010/050295, filed Sep. 24, 2010, which is incorporated by reference herein and Wu et al., “Rational design of envelope identifies broadly neutralizing human monoclonal antibodies to HIV-1,” Science, 329(5993):856-861, 2010, which is incorporated by reference herein. These include heavy and light chains of the VRC01, VRC02 and VRC03

[0296] VRC01-like antibodies, heavy chains and light chains disclosed in Scheid et al., “Sequence and structural convergence of broad and potent HIV antibodies that mimic CD4 binding,” Science, 333(6049):1633-1637, 2011, incorporated by reference herein. These include the heavy and light chains of the 3BNC117, 3BNC60, 12A12, 12A21, NIH4546, 8ANC131, 8ANC134, 1B2530, 1NC9 antibodies (corresponding Accession Nos. shown in Table 1, below, and disclosed in WIPO Pub. No. WO 2012/158948 A1, which is incorporated by reference herein) and up to 567 other clonal related antibodies, including those listed in Figures S3, S13, S14 and Table S8 of Scheid et al., which are specifically incorporated by reference herein.

[0297] Certain VRC01-like antibodies, heavy chains and light chains disclosed in Wu et al., “Focused evolution of HIV-1 neutralizing antibodies revealed by structures and deep sequencing,” Science, 333(6049):1593-1602, 2011, incorporated herein by reference. These certain VRC01-like antibodies, heavy chains and light chains include the heavy and light chains of the VRC-PG04 and VRC-PG04b antibodies (GENBANK® Accession Nos. JN159464 to JN159467, respectively), VRC-CH₃₀, VRC-CH31, and VRC-CH32 antibodies (GENBANK® Accession Nos. JN159434 to JN159439, respectively), and VRC-CH33 and VRC-CH34 antibodies (GENBANK® Accession Nos. JN159470 to 159473, respectively) (corresponding SEQ ID NOs for the heavy and light chains of these antibodies are shown in Table 1). These certain VRC01-like antibodies, heavy chains and light chains also include 24 heavy chains from donor 74, 2008 (GENBANK® Accession Nos. JN159440 to JN159463), two heavy chains from donor 45, 2008 (GENBANK® Accession Nos. JN159474 and JN159475) and two light chains from donor 45, 2001 (GENBANK® Accession Nos. JN159468 and JN159469). These certain VRC01-like antibodies, heavy chains and light chains also include 1561 unique sequences associated with neutralizing CDR H3 distributions with at least one low divergent member shown in FIG. 6B and Fig. S16 of Wu et al., Science, 333(6049):1593-1602, 2011 (GENBANK® Accession Nos. JN157873 to JN159433, respectively).

[0298] VRC01-like antibodies, heavy chains and light chains disclosed in Diskin et al., “Increasing the potency and breadth of an HIV antibody by using structure-based rational design,” Science, 334(6060):1289-93, 2011, incorporated by reference herein and U.S. Pat. App. Pub No. 2012/0288502 A1, incorporated by reference herein. These include the heavy and light chains of the NIH4546 antibody with a G54W amino acid substitution (Kabat numbering) in the heavy chain variable domain.

[0299] All the Accession Nos. discussed in this definition of “VRC01-like antibody, heavy chain or light chain,” are incorporated by reference as available on Dec. 6, 2012, examples of such Accession Numbers are shown in Table 1.

TABLE 1
VRC01-like antibody heavy and light chains

| Antibody | Heavy chain AA | Light chain AA |
|---|---|---|
| 3BNC117 | EMBL Acc. No. HE584537 | EMBL Acc. No. HE584538 |
| 3BNC60 | EMBL Acc. No. HE584535 | EMBL Acc. No. HE584536 |
| 12A12 | EMBL Acc. No. HE584539 | EMBL Acc. No. HE584540 |
| 12A21 | EMBL Acc. No. HE584541 | EMBL Acc. No. HE584542 |
| NIH4546 | EMBL Acc. No. HE584543 | EMBL Acc. No. HE584544 |
| 8ANC131 | EMBL Acc. No. HE584540 | EMBL Acc. No. HE584550 |
| 8ANC134 | EMBL Acc. No. HE584551 | EMBL Acc. No. HE584552 |
| 1B2530 | EMBL Acc. No. HE584545 | EMBL Acc. No. HE584546 |
| 1NC9 | EMBL Acc. No. HE584547 | EMBL Acc. No. HE584548 |

### II. Description of Several Embodiments

[0300] A. Neutralizing Monoclonal Antibodies

[0301] Isolated monoclonal antibodies that specifically bind gp120 are disclosed herein. The antibodies can be fully human. Also disclosed herein are compositions including these monoclonal antibodies and a pharmaceutically acceptable carrier. Nucleic acids encoding these antibodies, expression vectors including these nucleic acids, and isolated host cells that express the nucleic acids are also provided.

[0302] Compositions including the monoclonal antibodies specific for gp120 can be used for research, diagnostic and therapeutic purposes. For example, the monoclonal antibodies disclosed herein can be used to diagnose or treat a subject having an HIV-1 infection and/or AIDS. For example, the antibodies can be used to determine HIV-1 titer in a subject. The antibodies disclosed herein also can be used to study the biology of the human immunodeficiency virus.

[0303] The discussion of monoclonal antibodies below refers to isolated monoclonal antibodies that include heavy and light chain variable domains including a CDR1, CDR2 and CDR3 with reference to the IMGT or Kabat numbering scheme (unless the context indicates otherwise). The person of ordinary skill in the art will understand that various CDR numbering schemes (such as the Kabat, Chothia or IMGT numbering schemes) can be used to determine CDR positions.

[0304] Disclosed herein is the identification of the VRC07 monoclonal antibody, which specifically binds to the CD4 binding site of the gp120 protein of HIV, and is neutralizing VRC07 is a VRC01-like monoclonal antibody, and includes a novel heavy chain (“VRC07 heavy chain”) cross complemented with the light chain of the VRC01 monoclonal antibody. VRC07 heavy chain is a clonal variant of the VRC01 heavy chain. As described in the Examples section, VRC07 has increased binding affinity for gp120, but does not have increased self-reactivity, compared to VRC01. Further disclosed herein are variants of the VRC07 heavy chain and the VRC01 light chain, and cross-complemented monoclonal antibodies including such variants that have increased binding affinity for gp120, but do not have increased self-reactivity compared to VRC01.

[0305] The CDR positions of the VRC07 monoclonal antibody heavy chain according to the Kabat and IMGT numbering schemes are shown in FIG. 8. The CDR positions of the VRC01 light chain variable domain according to the Kabat and IMGT numbering schemes are shown in FIG. 8. In several embodiments, reference to particular amino acid substitutions in the heavy or light chains of the disclosed antibodies is made according to the Kabat numbering schemes. For example, the VRC07 heavy chain substitution G54H referenced herein refers to the Kabat numbering scheme. The person of ordinary skill in the art will appreciate that Kabat position G54 of the VRC07 heavy chain variable domain corresponds to position 55 of the linear sequence of the VRC07 heavy chain variable domain (set forth as SEQ ID NO: 2). The linear and Kabat positions of the VRC07 heavy chain variable domain and the VRC01 light chain variable domain are shown in FIG. 8. The person of skill in the art will readily understand use of various CDR and variable domain numbering schemes when referencing particular amino acids of the antibodies disclosed herein.

[0306] 1. Exemplary Monoclonal Antibodies

[0307] a. Exemplary Heavy chains

[0308] In some embodiments the antibody includes a heavy chain variable domain and a light chain variable domain, wherein heavy chain variable domain includes the amino acid sequence set forth as SEQ ID NO: 2 (VRC07 heavy chain variable domain), and further includes one or more amino acid substitutions at Kabat positions I37, G54, S58, and T93. As disclosed herein, SEQ ID NO: 40 is a consensus amino acid sequence of the heavy chain variable domain of VRC07 with amino acid substitutions at one, two, three, four, or none of positions I37, G54, S58, and T93 (Kabat numbering):

QVRLSQSGGQMKKPGDSMRISCRASGYEFINCPINWX₁RLAPGKRPEWMG
WMKPRX₂GAVX₃YARQLQGRVTMTRDMYSETAFLELRSLTSDDTAVYFC
X₄RGKYCTARDYYNWDFEHWGQGTPVTVSS;

wherein X₁ is I or V; X₂ is G or H; X₃ is S or N; and X₄ s T or A.

[0309] In some embodiments, the antibody includes a heavy chain variable domain and a light chain variable domain, wherein the heavy chain variable domain includes the HCDR1, HCD2 and/or HCD3 of SEQ ID NO: 40, as defined using the Kabat or IMGT CDR positions wherein the antibody specifically binds gp120, and wherein the antibody is neutralizing. In some embodiments, the antibody includes a heavy chain variable domain and a light chain variable domain, wherein the heavy chain variable domain includes the HCDR1, HCDR2 and HCDR3 of SEQ ID NO: 40, as defined using the Kabat or IMGT CDR positions wherein the antibody specifically binds gp120, and wherein the antibody is neutralizing. The person of ordinary skill in the art is familiar with the Kabat and IMGT CDR positioning in an antibody variable domain sequence.

[0310] In some embodiments, the antibody includes a heavy chain variable domain and a light chain variable domain, wherein the heavy chain variable domain includes the HCDR1, HCD2 and/or HCD3 of SEQ ID NO: 2, as defined using the Kabat or IMGT CDR positions, and further includes a FR1 having at least 85%, at least 90%, at least 95%, at least 98%, at least 99% sequence identity with the FR1 (IMGT or Kabat) of SEQ ID NO: 2, a FR1 having at least 85%, at least 90%, at least 95%, at least 98%, at least 99% sequence identity with the FR1 (IMGT or Kabat) of SEQ ID NO: 2, a FR1 having at least 85%, at least 90%, at least 95%, at least 98%, at least 99% sequence identity with the FR1 (IMGT or Kabat) of SEQ ID NO: 2, a FR1 having at least 85%, at least 90%, at least 95%, at least 98%, at least 99% sequence identity with the FR1 (IMGT or Kabat) of SEQ ID NO: 2, wherein the antibody specifically binds gp120, and wherein the antibody is neutralizing.

[0311] In some embodiments, the antibody includes a heavy chain variable domain and a light chain variable domain, wherein the heavy chain variable domain includes the HCDR1, HCD2 and/or HCD3 of SEQ ID NO: 2, as defined using the Kabat or IMGT CDR positions, and further includes a G54H substitution, and further includes a FR1 having at least 85%, at least 90%, at least 95%, at least 98%, at least 99% sequence identity with the FR1 (IMGT or Kabat) of SEQ ID NO: 2, a FR1 having at least 85%, at least 90%, at least 95%, at least 98%, at least 99% sequence identity with the FR1 (IMGT or Kabat) of SEQ ID NO: 2, a FR1 having at least 85%, at least 90%, at least 95%, at least 98%, at least 99% sequence identity with the FR1 (IMGT or Kabat) of SEQ ID NO: 2, a FR1 having at least 85%, at least 90%, at least 95%, at least 98%, at least 99% sequence identity with the FR1 (IMGT or Kabat) of SEQ ID NO: 2, wherein the antibody specifically binds gp120, and wherein the antibody is neutralizing

[0312] For example, in some embodiments, the antibody includes a heavy chain variable domain and a light chain variable domain, wherein the heavy chain variable domain includes amino acids 26-33 (CDR1), 51-58 (CDR2) and/or 97-114 (CDR3) of SEQ ID NO: 40 (IMGT), wherein the antibody specifically binds gp120, and wherein the antibody is neutralizing. In additional embodiments, the antibody includes a heavy chain variable domain and a light chain variable domain, wherein the heavy chain variable domain includes amino acids 26-33 (CDR1), 51-58 (CDR2) and 97-114 (CDR3) of SEQ ID NO: 40 (IMGT), wherein the antibody specifically binds gp120, and wherein the antibody is neutralizing. In some embodiments, the antibody includes a heavy chain variable domain and a light chain variable domain, wherein the heavy chain variable domain includes amino acids 31-35 (CDR1), 50-66 (CDR2) and/or 99-114 (CDR3) of SEQ ID NO: 40 (Kabat), wherein the antibody specifically binds gp120, and wherein the antibody is neutralizing. In additional embodiments, the antibody includes a heavy chain variable domain and a light chain variable domain, wherein the heavy chain variable domain includes amino acids 31-35 (CDR1), 50-66 (CDR2) and 99-114 (CDR3) of SEQ ID NO: 40 (Kabat), wherein the antibody specifically binds gp120, and wherein the antibody is neutralizing. In several embodiments, the antibody is not self-reactive, and/or has low self-reactivity. In additional embodiments, the antibody is not immunogenic and/or has low immunogenicity.

[0313] In additional embodiments, the antibody includes a heavy chain variable domain and a light chain variable domain, wherein the heavy chain variable domain includes amino acids 26-33 (CDR1), 51-58 (CDR2) and 97-114 (CDR3) of SEQ ID NO: 40 (IMGT), wherein X₂ is G, wherein the antibody specifically binds gp120, and wherein the antibody is neutralizing. In additional embodiments, the antibody includes a heavy chain variable domain and a light chain variable domain, wherein the heavy chain variable domain includes amino acids 26-33 (CDR1), 51-58 (CDR2) and 97-114 (CDR3) of SEQ ID NO: 40 (IMGT), wherein X₂ is H, wherein the antibody specifically binds gp120, and wherein the antibody is neutralizing. In additional embodiments, the antibody includes a heavy chain variable domain and a light chain variable domain, wherein the heavy chain variable domain includes amino acids 31-35 (CDR1), 50-66 (CDR2) and 99-114 (CDR3) of SEQ ID NO: 40 (Kabat), wherein X₂ is G and X₃ is S, wherein the antibody specifically binds gp120, and wherein the antibody is neutralizing. In additional embodiments, the antibody includes a heavy chain variable domain and a light chain variable domain, wherein the heavy chain variable domain includes amino acids 31-35 (CDR1), 50-66 (CDR2) and 99-114 (CDR3) of SEQ ID NO: 40 (Kabat), wherein X₂ is H and X₃ is S, wherein the antibody specifically binds gp120, and wherein the antibody is neutralizing. In additional embodiments, the antibody includes a heavy chain variable domain and a light chain variable domain, wherein the heavy chain variable domain includes amino acids 31-35 (CDR1), 50-66 (CDR2) and 99-114 (CDR3) of SEQ ID NO: 40 (Kabat), wherein X₂ is G and X₃ is N, wherein the antibody specifically binds gp120, and wherein the antibody is neutralizing. In additional embodiments, the antibody includes a heavy chain variable domain and a light chain variable domain, wherein the heavy chain variable domain includes amino acids 31-35 (CDR1), 50-66 (CDR2) and 99-114 (CDR3) of SEQ ID NO: 40 (Kabat), wherein X₂ is H and X₃ is N, wherein the antibody specifically binds gp120, and wherein the antibody is neutralizing. In several embodiments, the antibody is not self-reactive, and/or has low self-reactivity. In additional embodiments, the antibody is not immunogenic and/or has low immunogenicity.

[0314] In additional embodiments, the antibody includes a heavy chain variable domain and a light chain variable domain, wherein the heavy chain variable domain includes the amino acid sequence of SEQ ID NO: 40, wherein X₁ is I, X₂ is H, X₃ is S and X₄ is T (VRC07 G54H; SEQ ID NO: 32), wherein the antibody specifically binds gp120, and wherein the antibody is neutralizing. In additional embodiments, the antibody includes a heavy chain variable domain and a light chain variable domain, wherein the heavy chain variable domain includes the amino acid sequence of SEQ ID NO: 40, wherein X₁ is I, X₂ is H, X₃ is N and X₄ is T (VRC07 G54H, S58N; SEQ ID NO: 258), wherein the antibody specifically binds gp120, and wherein the antibody is neutralizing. In additional embodiments, the antibody includes a heavy chain variable domain and a light chain variable domain, wherein the heavy chain variable domain includes the amino acid sequence of SEQ ID NO: 40, wherein X₁ is V, X₂ is H, X₃ is S and X₄ is A (VRC07 I37V, G54H, T93A; SEQ ID NO: 259), wherein the antibody specifically binds gp120, and wherein the antibody is neutralizing. In additional embodiments, the antibody includes a heavy chain variable domain and a light chain variable domain, wherein the heavy chain variable domain includes the amino acid sequence of SEQ ID NO: 40,

[0315] wherein X₁ is V, X₂ is H, X₃ is N and X₄ is A (VRC07 I37V, G54H, S58N, T93A; SEQ ID NO: 260), wherein the antibody specifically binds gp120, and wherein the antibody is neutralizing. In several embodiments, the antibody is not self-reactive, and/or has low self-reactivity. In additional embodiments, the antibody is not immunogenic and/or has low immunogenicity.

[0316] The disclosed heavy chain variable domains can be included on a heavy chain that is complemented with a VRC01 light chain or any of the VRC01 light chain variants disclosed herein (such as the antibody light chains described in the next section) to generate a monoclonal antibody that specifically binds to gp120 and is neutralizing. In some embodiments, the heavy chain can be complemented with the light chain of a known VRC01-like antibody (for example the light chain of VRC01 or NIH4546,) to generate a monoclonal antibody that specifically binds to gp120 and is neutralizing

VRC01-Like Heavy Chains with G54H Substitution

[0317] The person of ordinary skill in the art will appreciate that the histidine substitution at Kabat position 54 of the VRC07 heavy chain variable domain disclosed herein can be included on other VRC01-like antibodies, to generate a monoclonal antibody with improved binding affinity of gp120, but which is not self-reactive and/or has low self-reactivity. For example, in several embodiments, the histidine substitution at Kabat position 54 of can be included on the heavy chain variable domain of a VRC01-like antibody, to generate a monoclonal antibody with improved binding affinity of gp120, but which is not self-reactive and/or has low self-reactivity, for example, compared to the VRC01-like antibody in the absence of the histidine substitution at Kabat position 54.

[0318] Accordingly, in some embodiments, an isolated VRC01-like monoclonal antibody is provided, wherein the antibody includes a VRC01-like heavy chain and a VRC01-like light chain, wherein the heavy chain further includes substitution of a histidine residue for the residue at position 54 (Kabat numbering) of the heavy chain, wherein the antibody specifically binds gp120 of HIV-1, and wherein the antibody is neutralizing. In some embodiments, the amino acid substitution is a G54H substitution. Non-limiting examples of VRC01-like monoclonal antibody heavy chain variable domains that can be modified with the histidine substitution at Kabat position 54 include the heavy chain variable domains of the VRC01, VRC02, VRC03, NIH4546, VRC-PG04, VRC-PG04b, VRC-CH30, VRC-CH31, VRC-CH32, VRC-CH33, VRC-CH34, 3BNC60, 3BNC117, 12A12, 12A21, 1NC9, 1B2530, 8ANC131 or 8ANC134 monoclonal antibodies. The sequence of accession numbers of the heavy chain variable domains of these antibodies are familiar to the person of ordinary skill in the art and provided herein.

[0319] For example, in some embodiments, the antibody includes a heavy chain variable domain and a light chain variable domain, wherein the heavy chain variable domain includes amino acids 26-33 (CDR1), 51-58 (CDR2) and 97-114 (CDR3) of SEQ ID NO: 196 (NIH4546 heavy chain variable domain, IMGT CDRs), further including a glycine to histidine substitution at Kabat position 54 (a G54H substitution), wherein the antibody specifically binds gp120, and wherein the antibody is neutralizing. In additional embodiments, the antibody includes a heavy chain variable domain and a light chain variable domain, wherein the heavy chain variable domain includes amino acids 31-35 (CDR1), 50-66 (CDR2) and 99-114 (CDR3) of SEQ ID NO: 196 (NIH4546 heavy chain variable domain, IMGT CDRs), further including a glycine to histidine substitution at Kabat position 54 (a G54H substitution), wherein the antibody specifically binds gp120, and wherein the antibody is neutralizing. In additional embodiments, the antibody includes a heavy chain variable domain and a light chain variable domain, wherein the heavy chain variable domain includes the amino acid sequence set forth as SEQ ID NO: 196, and further including a glycine to histidine substitution at Kabat position 54 (a G54H substitution), wherein the antibody specifically binds gp120, and wherein the antibody is neutralizing. In several embodiments, the antibody is not self-reactive, and/or has low self-reactivity. In additional embodiments, the antibody is not immunogenic and/or has low immunogenicity.

[0320] b. Exemplary Light Chains

[0321] As disclosed herein, SEQ ID NO: 238 is a consensus amino acid sequence of a VRC01-like light chain variable domain with amino acid substitutions at one or more of positions E1, 12, V3, 120, S63, S65, W67, D70, N72, T74, F97, V106, and 1108 (Kabat numbering) compared to the light chain variable domain of

VRC01: X₁X₂X₃LTQSPGTLSLSPGETAX₄ISCRTSQYGSLAWYQQRPGQAPRLVIYSGSTRAAGIPDRF X₅GX₆RX₇GPX₈YX₉LX₁₀ISNLESGDFGVYYCQQYEX₁₁FGQGTKVQX₁₂DX₁₃K (SEQ ID NO: 238), wherein X₁ is E or no amino acid; X₂ is I or no amino acid; X₃ is V, E, K, or S; X₄ is I, Q, E, or T; X₅ is S or K; X₆ is S or E; X₇ is W, S, N or E; X₈ is D or E; X₉ is N, T or R; X₁₀ is T or R; X₁₁ is F, D, K, S or H; X₁₂ is V or Q; X₁₃ is I or N.

[0322] In some embodiments, the antibody includes a VRC01-like heavy chain variable domain as disclosed herein and a light chain variable domain, wherein the light chain variable domain includes the LCDR1, LCD2 and/or LCD3 of SEQ ID NO: 238, as defined using the Kabat or IMGT CDR positions, wherein the antibody specifically binds gp120, and wherein the antibody is neutralizing. In some embodiments, the antibody includes a heavy chain variable domain and a light chain variable domain, wherein the light chain variable domain includes the LCDR1, LCDR2 and LCDR3 of SEQ ID NO: 238, as defined using the Kabat or IMGT CDR positions, wherein the antibody specifically binds gp120, and wherein the antibody is neutralizing

[0323] In some embodiments, the antibody includes a light chain variable domain and a light chain variable domain, wherein the light chain variable domain includes the LCDR1, LCD2 and/or LCD3 of SEQ ID NO: 9, as defined using the Kabat or IMGT CDR positions, and further includes a FR1 having at least 85%, at least 90%, at least 95%, at least 98%, at least 99% sequence identity with the FR1 (IMGT or Kabat) of SEQ ID NO: 9, a FR1 having at least 85%, at least 90%, at least 95%, at least 98%, at least 99% sequence identity with the FR1 (IMGT or Kabat) of SEQ ID NO: 9, a FR1 having at least 85%, at least 90%, at least 95%, at least 98%, at least 99% sequence identity with the FR1 (IMGT or Kabat) of SEQ ID NO: 9, a FR1 having at least 85%, at least 90%, at least 95%, at least 98%, at least 99% sequence identity with the FR1 (IMGT or Kabat) of SEQ ID NO: 9, wherein the antibody specifically binds gp120, and wherein the antibody is neutralizing

[0324] In some embodiments, the antibody includes a heavy chain variable domain and a light chain variable domain, wherein the heavy chain variable domain includes the HCDR1, HCD2 and/or HCD3 of SEQ ID NO: 2, as defined using the Kabat or IMGT CDR positions, and further includes an amino acid substitution at Kabat position F97 (such as a F97D, F97K, F97S, F97H), and further includes a FR1 having at least 85%, at least 90%, at least 95%, at least 98%, at least 99% sequence identity with the FR1 (IMGT or Kabat) of SEQ ID NO: 2, a FR1 having at least 85%, at least 90%, at least 95%, at least 98%, at least 99% sequence identity with the FR1 (IMGT or Kabat) of SEQ ID NO: 2, a FR1 having at least 85%, at least 90%, at least 95%, at least 98%, at least 99% sequence identity with the FR1 (IMGT or Kabat) of SEQ ID NO: 2, a FR1 having at least 85%, at least 90%, at least 95%, at least 98%, at least 99% sequence identity with the FR1 (IMGT or Kabat) of SEQ ID NO: 2, wherein the antibody specifically binds gp120, and wherein the antibody is neutralizing

[0325] For example, in some embodiments the antibody includes a heavy chain variable domain and a light chain variable domain, wherein the light chain variable domain includes amino acids 24-32 (CDR1), 48-54 (CDR2) and/or 87-91 (CDR3) of SEQ ID NO: 238 (Kabat). In some embodiments the antibody includes a heavy chain variable domain and a light chain variable domain, wherein the light chain variable domain includes amino acids 24-32 (CDR1), 48-54 (CDR2) and 87-91 (CDR3) of SEQ ID NO: 238 (Kabat). In additional embodiments the antibody includes a heavy chain variable domain and a light chain variable domain, wherein the light chain variable domain includes amino acids 27-30 (CDR1), 48-50 (CDR2) and/or 87-91 (CDR3) of SEQ ID NO: 238 (IMGT). In some embodiments the antibody includes a heavy chain variable domain and a light chain variable domain, wherein the light chain variable domain includes amino acids 27-30 (CDR1), 48-50 (CDR2) and 87-91 (CDR3) of SEQ ID NO: 238 (IMGT). In several embodiments, the antibody is not self-reactive, and/or has low self-reactivity. In additional embodiments, the antibody is not immunogenic and/or has low immunogenicity.

[0326] In some examples the light chain of the antibody includes the LCDR1, LCDR2, and/or LCD3 of SEQ ID NO: 238, and further includes an amino acid substitution at Kabat position F97, which is included in the LCDR3 of SEQ ID NO: 238 using either Kabat or IMGT positioning. For example, in some embodiments the antibody includes a heavy chain variable domain and a light chain variable domain, wherein the light chain variable domain includes amino acids 24-32 (CDR1), 48-54 (CDR2) and 87-91 (CDR3) of SEQ ID NO: 238, wherein X₁₁ is F (VRC01 light chain Kabat CDRs with F97), wherein the antibody specifically binds gp120, and wherein the antibody is neutralizing. In some embodiments the antibody includes a heavy chain variable domain and a light chain variable domain, wherein the light chain variable domain includes amino acids 24-32 (CDR1), 48-54 (CDR2) and 87-91 (CDR3) of SEQ ID NO: 238, wherein X₁₁ is D (VRC01 light chain Kabat CDRs with F97D), wherein the antibody specifically binds gp120, and wherein the antibody is neutralizing. In additional embodiments the antibody includes a heavy chain variable domain and a light chain variable domain, wherein the light chain variable domain includes amino acids 24-32 (CDR1), 48-54 (CDR2) and 87-91 (CDR3) of SEQ ID NO: 238, wherein X₁₁ is K (VRC01 light chain Kabat CDRs with F97K), wherein the antibody specifically binds gp120, and wherein the antibody is neutralizing. In additional embodiments the antibody includes a heavy chain variable domain and a light chain variable domain, wherein the light chain variable domain includes amino acids 24-32 (CDR1), 48-54 (CDR2) and 87-91 (CDR3) of SEQ ID NO: 238, wherein X₁₁ is S (VRC01 light chain Kabat CDRs with F97S), wherein the antibody specifically binds gp120, and wherein the antibody is neutralizing.

[0327] In additional embodiments the antibody includes a heavy chain variable domain and a light chain variable domain, wherein the light chain variable domain includes amino acids 24-32 (CDR1), 48-54 (CDR2) and 87-91 (CDR3) of SEQ ID NO: 238, wherein X₁₁ is H (VRC01 light chain Kabat CDRs with F97H), wherein the antibody specifically binds gp120, and wherein the antibody is neutralizing. In several embodiments, the antibody is not self-reactive, and/or has low self-reactivity. In additional embodiments, the antibody is not immunogenic and/or has low immunogenicity.

[0328] In additional embodiments the antibody includes a heavy chain variable domain and a light chain variable domain, wherein the light chain variable domain includes amino acids 27-30 (CDR1), 48-50 (CDR2) and 87-91 (CDR3) of SEQ ID NO: 238, wherein X₁₁ is F (VRC01 light chain IMGT CDRs with F97), wherein the antibody specifically binds gp120, and wherein the antibody is neutralizing. In additional embodiments the antibody includes a heavy chain variable domain and a light chain variable domain, wherein the light chain variable domain includes amino acids 27-30 (CDR1), 48-50 (CDR2) and 87-91 (CDR3) of SEQ ID NO: 238, wherein X₁₁ is D (VRC01 light chain IMGT CDRs with F97D), wherein the antibody specifically binds gp120, and wherein the antibody is neutralizing. In additional embodiments the antibody includes a heavy chain variable domain and a light chain variable domain, wherein the light chain variable domain includes amino acids 27-30 (CDR1), 48-50 (CDR2) and 87-91 (CDR3) of SEQ ID NO: 238, wherein X₁₁ is K (VRC01 light chain IMGT CDRs with F97K), wherein the antibody specifically binds gp120, and wherein the antibody is neutralizing. In additional embodiments the antibody includes a heavy chain variable domain and a light chain variable domain, wherein the light chain variable domain includes amino acids 27-30 (CDR1), 48-50 (CDR2) and 87-91 (CDR3) of SEQ ID NO: 238, wherein X₁₁ is S (VRC01 light chain IMGT CDRs with F97S), wherein the antibody specifically binds gp120, and wherein the antibody is neutralizing. In additional embodiments the antibody includes a heavy chain variable domain and a light chain variable domain, wherein the light chain variable domain includes amino acids 27-30 (CDR1), 48-50 (CDR2) and 87-91 (CDR3) of SEQ ID NO: 238, wherein X₁₁ is H (VRC01 light chain IMGT CDRs with F97H), wherein the antibody specifically binds gp120, and wherein the antibody is neutralizing. In several embodiments, the antibody is not self-reactive, and/or has low self-reactivity. In additional embodiments, the antibody is not immunogenic and/or has low immunogenicity.

### VRC01L

[0329] In some embodiments the antibody includes a heavy chain variable domain and a light chain variable domain, wherein the light chain variable domain includes the amino acid sequence set forth as SEQ ID NO: 238, wherein X₁ is E; X₂ is I; X₃ is V; X₄ is I; X₅ is S; X₆ is S; X₇ is W; X₈ is D; X₉ is N; X₁₀ is T; X₁₁ is F; X₁₂ is V; X₁₃ is I (VRC01 light chain; SEQ ID NO: 9). The light chain can be complemented with any of the VRC07 heavy chain variants disclosed herein (such as the antibody heavy chains described in the above section) to generate a monoclonal antibody that specifically binds to gp120 and is neutralizing. In several embodiments, the antibody is not self-reactive, and/or has low self-reactivity. In additional embodiments, the antibody is not immunogenic and/or has low immunogenicity.

### VRC01L E1/I2 Deletion, V3E

[0330] In some embodiments the antibody includes a heavy chain variable domain and a light chain variable domain, wherein the light chain variable domain includes the amino acid sequence set forth as SEQ ID NO: 238, wherein X₁ is no amino acid; X₂ is no amino acid; X₃ is E; X₄ is I; X₅ is S; X₆ is S; X₇ is W; X₈ is D; X₉ is N; X₁₀ is T; X₁₁ is F; X₁₂ is V; X₁₃ is I (VRC01L V3E light chain; SEQ ID NO: 219). The light chain can be complemented with VRC07 heavy chain or any of the VRC07 heavy chain variants disclosed herein (such as the antibody heavy chains described in the above section) to generate a monoclonal antibody that specifically binds to gp120 and is neutralizing. In some embodiments, the light chain can be complemented with the heavy chain of a known VRC01-like antibody (for example the heavy chain of VRC01, NIH4546, or NIH4546 G54W) to generate a monoclonal antibody that specifically binds to gp120 and is neutralizing. In several embodiments, the antibody is not self-reactive, and/or has low self-reactivity. In additional embodiments, the antibody is not immunogenic and/or has low immunogenicity.

### VRC01L E1/I2 Deletion, V3K

[0331] In some embodiments the antibody includes a heavy chain variable domain and a light chain variable domain, wherein the light chain variable domain includes the amino acid sequence set forth as SEQ ID NO: 238, wherein X₁ is no amino acid; X₂ is no amino acid; X₃ is K; X₄ is I; X₅ is S; X₆ is S; X₇ is W; X₈ is D; X₉ is N; X₁₀ is T; X₁₁ is F; X₁₂ is V; X₁₃ is I (VRC01L V3K light chain; SEQ ID NO: 220). The light chain can be complemented with VRC07 heavy chain or any of the VRC07 heavy chain variants disclosed herein (such as the antibody heavy chains described in the above section) to generate a monoclonal antibody that specifically binds to gp120 and is neutralizing. In some embodiments, the light chain can be complemented with the heavy chain of a known VRC01-like antibody (for example the heavy chain of VRC01, NIH4546, or NIH4546 G54W) to generate a monoclonal antibody that specifically binds to gp120 and is neutralizing. In several embodiments, the antibody is not self-reactive, and/or has low self-reactivity. In additional embodiments, the antibody is not immunogenic and/or has low immunogenicity.

VRC01L E1/I2 deletion, V3S

[0332] In some embodiments the antibody includes a heavy chain variable domain and a light chain variable domain, wherein the light chain variable domain includes the amino acid sequence set forth as SEQ ID NO: 238, wherein X₁ is no amino acid; X₂ is no amino acid; X₃ is S; X₄ is I; X₅ is S; X₆ is S; X₇ is W; X₈ is D; X₉ is N; X₁₀ is T; X₁₁ is F; X₁₂ is V; X₁₃ is I (VRC01L V3S light chain; SEQ ID NO: 221). The light chain can be complemented with VRC07 heavy chain or any of the VRC07 heavy chain variants disclosed herein (such as the antibody heavy chains described in the above section) to generate a monoclonal antibody that specifically binds to gp120 and is neutralizing. In some embodiments, the light chain can be complemented with the heavy chain of a known VRC01-like antibody (for example the heavy chain of VRC01, NIH4546, or NIH4546 G54W) to generate a monoclonal antibody that specifically binds to gp120 and is neutralizing. In several embodiments, the antibody is not self-reactive, and/or has low self-reactivity. In additional embodiments, the antibody is not immunogenic and/or has low immunogenicity.

VRC01L E1/I2 deletion, F97D

[0333] In some embodiments the antibody includes a heavy chain variable domain and a light chain variable domain, wherein the light chain variable domain includes the amino acid sequence set forth as SEQ ID NO: 238, wherein X₁ is no amino acid; X₂ is no amino acid; X₃ is V; X₄ is I; X₅ is S; X₆ is S; X₇ is W; X₈ is D; X₉ is N; X₁₀ is T; X₁₁ is D; X₁₂ is V; X₁₃ is I (VRC01L F97D light chain; SEQ ID NO: 222). The light chain can be complemented with VRC07 heavy chain or any of the VRC07 heavy chain variants disclosed herein (such as the antibody heavy chains described in the above section) to generate a monoclonal antibody that specifically binds to gp120 and is neutralizing. In some embodiments, the light chain can be complemented with the heavy chain of a known VRC01-like antibody (for example the heavy chain of VRC01, NIH4546, or NIH4546 G54W) to generate a monoclonal antibody that specifically binds to gp120 and is neutralizing. In several embodiments, the antibody is not self-reactive, and/or has low self-reactivity. In additional embodiments, the antibody is not immunogenic and/or has low immunogenicity.

VRC01L E1/I2 deletion, F97K

[0334] In some embodiments the antibody includes a heavy chain variable domain and a light chain variable domain, wherein the light chain variable domain includes the amino acid sequence set forth as SEQ ID NO: 238, wherein X₁ is no amino acid; X₂ is no amino acid; X₃ is V; X₄ is I; X₅ is S; X₆ is S; X₇ is W; X₈ is D; X₉ is N; X₁₀ is T; X₁₁ is K; X₁₂ is V; X₁₃ is I (VRC01L F97K light chain; SEQ ID NO: 223). The light chain can be complemented with VRC07 heavy chain or any of the VRC07 heavy chain variants disclosed herein (such as the antibody heavy chains described in the above section) to generate a monoclonal antibody that specifically binds to gp120 and is neutralizing. In some embodiments, the light chain can be complemented with the heavy chain of a known VRC01-like antibody (for example the heavy chain of VRC01, NIH4546, or NIH4546 G54W) to generate a monoclonal antibody that specifically binds to gp120 and is neutralizing. In several embodiments, the antibody is not self-reactive, and/or has low self-reactivity. In additional embodiments, the antibody is not immunogenic and/or has low immunogenicity.

### VRC01L E1/I2 Deletion, F97S

[0335] In some embodiments the antibody includes a heavy chain variable domain and a light chain variable domain, wherein the light chain variable domain includes the amino acid sequence set forth as SEQ ID NO: 238, wherein X₁ is no amino acid; X₂ is no amino acid; X₃ is V; X₄ is I; X₅ is S; X₆ is S; X₇ is W; X₈ is D; X₉ is N; X₁₀ is T; X₁₁ is S; X₁₂ is V; X₁₃ is I (VRC01L F97S light chain; SEQ ID NO: 224). The light chain can be complemented with VRC07 heavy chain or any of the VRC07 heavy chain variants disclosed herein (such as the antibody heavy chains described in the above section) to generate a monoclonal antibody that specifically binds to gp120 and is neutralizing. In some embodiments, the light chain can be complemented with the heavy chain of a known VRC01-like antibody (for example the heavy chain of VRC01, NIH4546, or NIH4546 G54W) to generate a monoclonal antibody that specifically binds to gp120 and is neutralizing. In several embodiments, the antibody is not self-reactive, and/or has low self-reactivity. In additional embodiments, the antibody is not immunogenic and/or has low immunogenicity.

### VRC01L E1/I2 Deletion, F97H

[0336] In some embodiments the antibody includes a heavy chain variable domain and a light chain variable domain, wherein the light chain variable domain includes the amino acid sequence set forth as SEQ ID NO: 238, wherein X₁ is no amino acid; X₂ is no amino acid; X₃ is V; X₄ is I; X₅ is S; X₆ is S; X₇ is W; X₈ is D; X₉ is N; X₁₀ is T; X₁₁ is H; X₁₂ is V; X₁₃ is I (VRC01L F97H light chain; SEQ ID NO: 225). The light chain can be complemented with VRC07 heavy chain or any of the VRC07 heavy chain variants disclosed herein (such as the antibody heavy chains described in the above section) to generate a monoclonal antibody that specifically binds to gp120 and is neutralizing. In some embodiments, the light chain can be complemented with the heavy chain of a known VRC01-like antibody (for example the heavy chain of VRC01, NIH4546, or NIH4546 G54W) to generate a monoclonal antibody that specifically binds to gp120 and is neutralizing. In several embodiments, the antibody is not self-reactive, and/or has low self-reactivity. In additional embodiments, the antibody is not immunogenic and/or has low immunogenicity.

### VRC01L E1/I2 Deletion, V3E/F97S

[0337] In some embodiments the antibody includes a heavy chain variable domain and a light chain variable domain, wherein the light chain variable domain includes the amino acid sequence set forth as SEQ ID NO: 238, wherein X₁ is no amino acid; X₂ is no amino acid; X₃ is E; X₄ is I; X₅ is S; X₆ is S; X₇ is W; X₈ is D; X₉ is N; X₁₀ is T; X₁₁ is S; X₁₂ is V; X₁₃ is I (VRC01L V3E/F97S light chain; SEQ ID NO:226). The light chain can be complemented with VRC07 heavy chain or any of the VRC07 heavy chain variants disclosed herein (such as the antibody heavy chains described in the above section) to generate a monoclonal antibody that specifically binds to gp120 and is neutralizing. In some embodiments, the light chain can be complemented with the heavy chain of a known VRC01-like antibody (for example the heavy chain of VRC01, NIH4546, or NIH4546 G54W) to generate a monoclonal antibody that specifically binds to gp120 and is neutralizing. In several embodiments, the antibody is not self-reactive, and/or has low self-reactivity. In additional embodiments, the antibody is not immunogenic and/or has low immunogenicity.

### VRC01L E1/I2 Deletion, V3E/F97H

[0338] In some embodiments the antibody includes a heavy chain variable domain and a light chain variable domain, wherein the light chain variable domain includes the amino acid sequence set forth as SEQ ID NO: 238, wherein X₁ is no amino acid; X₂ is no amino acid; X₃ is E; X₄ is I; X₅ is S; X₆ is S; X₇ is W; X₈ is D; X₉ is N; X₁₀ is T; X₁₁ is H; X₁₂ is V; X₁₃ is I (VRC01L V3E/F97H light chain; SEQ ID NO: 227). The light chain can be complemented with VRC07 heavy chain or any of the VRC07 heavy chain variants disclosed herein (such as the antibody heavy chains described in the above section) to generate a monoclonal antibody that specifically binds to gp120 and is neutralizing. In some embodiments, the light chain can be complemented with the heavy chain of a known VRC01-like antibody (for example the heavy chain of VRC01, NIH4546, or NIH4546 G54W) to generate a monoclonal antibody that specifically binds to gp120 and is neutralizing. In several embodiments, the antibody is not self-reactive, and/or has low self-reactivity. In additional embodiments, the antibody is not immunogenic and/or has low immunogenicity.

VRC01hpL03

[0339] In some embodiments the antibody includes a heavy chain variable domain and a light chain variable domain, wherein the light chain variable domain includes the amino acid sequence set forth as SEQ ID NO: 238, wherein X₁ is E; X₂ is I; X₃ is V; X₄ is I; X₅ is S; X₆ is S; X₇ is S; X₈ is D; X₉ is T; X₁₀ is T; X₁₁ is F; X₁₂ is V; X₁₃ is I (VRC01hpL03 light chain; SEQ ID NO: 228). The light chain can be complemented with VRC07 heavy chain or any of the VRC07 heavy chain variants disclosed herein (such as the antibody heavy chains described in the above section) to generate a monoclonal antibody that specifically binds to gp120 and is neutralizing. In some embodiments, the light chain can be complemented with the heavy chain of a known VRC01-like antibody (for example the heavy chain of VRC01, NIH4546, or NIH4546 G54W) to generate a monoclonal antibody that specifically binds to gp120 and is neutralizing. In several embodiments, the antibody is not self-reactive, and/or has low self-reactivity. In additional embodiments, the antibody is not immunogenic and/or has low immunogenicity.

VRC01hpL04

[0340] In some embodiments the antibody includes a heavy chain variable domain and a light chain variable domain, wherein the light chain variable domain includes the amino acid sequence set forth as SEQ ID NO: 238, wherein X₁ is E; X₂ is I; X₃ is V; X₄ is Q; X₅ is S; X₆ is S; X₇ is N; X₈ is D; X₉ is T; X₁₀ is T; X₁₁ is F; X₁₂ is V; X₁₃ is I (VRC01hpL04 light chain; SEQ ID NO: 229). The light chain can be complemented with VRC07 heavy chain or any of the VRC07 heavy chain variants disclosed herein (such as the antibody heavy chains described in the above section) to generate a monoclonal antibody that specifically binds to gp120 and is neutralizing. In some embodiments, the light chain can be complemented with the heavy chain of a known VRC01-like antibody (for example the heavy chain of VRC01, NIH4546, or NIH4546 G54W) to generate a monoclonal antibody that specifically binds to gp120 and is neutralizing. In several embodiments, the antibody is not self-reactive, and/or has low self-reactivity. In additional embodiments, the antibody is not immunogenic and/or has low immunogenicity.

VRC01hpL05

[0341] In some embodiments the antibody includes a heavy chain variable domain and a light chain variable domain, wherein the light chain variable domain includes the amino acid sequence set forth as SEQ ID NO: 238, wherein X₁ is E; X₂ is I; X₃ is V; X₄ is Q; X₅ is S; X₆ is S; X₇ is N; X₈ is D; X₉ is T; X₁₀ is T; X₁₁ is F; X₁₂ is Q; X₁₃ is N (VRC01hpL05 light chain; SEQ ID NO: 230). The light chain can be complemented with VRC07 heavy chain or any of the VRC07 heavy chain variants disclosed herein (such as the antibody heavy chains described in the above section) to generate a monoclonal antibody that specifically binds to gp120 and is neutralizing. In some embodiments, the light chain can be complemented with the heavy chain of a known VRC01-like antibody (for example the heavy chain of VRC01, NIH4546, or NIH4546 G54W) to generate a monoclonal antibody that specifically binds to gp120 and is neutralizing. In several embodiments, the antibody is not self-reactive, and/or has low self-reactivity. In additional embodiments, the antibody is not immunogenic and/or has low immunogenicity.

VRC01hpL06

[0342] In some embodiments the antibody includes a heavy chain variable domain and a light chain variable domain, wherein the light chain variable domain includes the amino acid sequence set forth as SEQ ID NO: 238, wherein X₁ is E; X₂ is I; X₃ is V; X₄ is E; X₅ is K; X₆ is E; X₇ is E; X₈ is E; X₉ is R; X₁₀ is R; X₁₁ is F; X₁₂ is Q; X₁₃ is N (VRC01hpL06 light chain; SEQ ID NO: 231). The light chain can be complemented with VRC07 heavy chain or any of the VRC07 heavy chain variants disclosed herein (such as the antibody heavy chains described in the above section) to generate a monoclonal antibody that specifically binds to gp120 and is neutralizing. In some embodiments, the light chain can be complemented with the heavy chain of a known VRC01-like antibody (for example the heavy chain of VRC01, NIH4546, or NIH4546 G54W) to generate a monoclonal antibody that specifically binds to gp120 and is neutralizing. In several embodiments, the antibody is not self-reactive, and/or has low self-reactivity. In additional embodiments, the antibody is not immunogenic and/or has low immunogenicity.

VRC01hpL02 E1/I2 deletion/V3S

[0343] In some embodiments the antibody includes a heavy chain variable domain and a light chain variable domain, wherein the light chain variable domain includes the amino acid sequence set forth as SEQ ID NO: 238, wherein X₁ is no amino acid; X₂ is no amino acid; X₃ is S; X₄ is T; X₅ is S; X₆ is S; X₇ is S; X₈ is D; X₉ is T; X₁₀ is T; X₁₁ is F; X₁₂ is Q; X₁₃ is N (VRC01hpL02 E1/I2 deletion/V3S light chain; SEQ ID NO: 232). The light chain can be complemented with VRC07 heavy chain or any of the VRC07 heavy chain variants disclosed herein (such as the antibody heavy chains described in the above section) to generate a monoclonal antibody that specifically binds to gp120 and is neutralizing. In some embodiments, the light chain can be complemented with the heavy chain of a known VRC01-like antibody (for example the heavy chain of VRC01, NIH4546, or NIH4546 G54W) to generate a monoclonal antibody that specifically binds to gp120 and is neutralizing. In several embodiments, the antibody is not self-reactive, and/or has low self-reactivity. In additional embodiments, the antibody is not immunogenic and/or has low immunogenicity.

VRC01hpL03 E1/I2 Deletion/V3S

[0344] In some embodiments the antibody includes a heavy chain variable domain and a light chain variable domain, wherein the light chain variable domain includes the amino acid sequence set forth as SEQ ID NO: 238, wherein X₁ is no amino acid; X₂ is no amino acid; X₃ is S; X₄ is I; X₅ is S; X₆ is S; X₇ is S; X₈ is D; X₉ is T; X₁₀ is T; X₁₁ is F; X₁₂ is V; X₁₃ is I (VRC01hpL03 E1/I2 deletion/V3S light chain; SEQ ID NO: 233). The light chain can be complemented with VRC07 heavy chain or any of the VRC07 heavy chain variants disclosed herein (such as the antibody heavy chains described in the above section) to generate a monoclonal antibody that specifically binds to gp120 and is neutralizing. In some embodiments, the light chain can be complemented with the heavy chain of a known VRC01-like antibody (for example the heavy chain of VRC01, NIH4546, or NIH4546 G54W) to generate a monoclonal antibody that specifically binds to gp120 and is neutralizing. In several embodiments, the antibody is not self-reactive, and/or has low self-reactivity. In additional embodiments, the antibody is not immunogenic and/or has low immunogenicity.

VRC01hpL04 E1/I2 Deletion/V3S

[0345] In some embodiments the antibody includes a heavy chain variable domain and a light chain variable domain, wherein the light chain variable domain includes the amino acid sequence set forth as SEQ ID NO: 238, wherein X₁ is no amino acid; X₂ is no amino acid; X₃ is S; X₄ is Q; X₅ is S; X₆ is S; X₇ is N; X₈ is D; X₉ is T; X₁₀ is T; X₁₁ is F; X₁₂ is V; X₁₃ is I (VRC01hpL04 E1/I2 deletion/V3S light chain; SEQ ID NO: 234). The light chain can be complemented with VRC07 heavy chain or any of the VRC07 heavy chain variants disclosed herein (such as the antibody heavy chains described in the above section) to generate a monoclonal antibody that specifically binds to gp120 and is neutralizing. In some embodiments, the light chain can be complemented with the heavy chain of a known VRC01-like antibody (for example the heavy chain of VRC01, NIH4546, or NIH4546 G54W) to generate a monoclonal antibody that specifically binds to gp120 and is neutralizing. In several embodiments, the antibody is not self-reactive, and/or has low self-reactivity. In additional embodiments, the antibody is not immunogenic and/or has low immunogenicity.

VRC01hpL05 E1/I2 Deletion/V3S

[0346] In some embodiments the antibody includes a heavy chain variable domain and a light chain variable domain, wherein the light chain variable domain includes the amino acid sequence set forth as SEQ ID NO: 238, wherein X₁ is no amino acid; X₂ is no amino acid; X₃ is S; X₄ is Q; X₅ is S; X₆ is S; X₇ is N; X₈ is D; X₉ is T; X₁₀ is T; X₁₁ is F; X₁₂ is Q; X₁₃ is N (VRC01hpL05 E1/I2 deletion/V3S light chain; SEQ ID NO: 235). The light chain can be complemented with VRC07 heavy chain or any of the VRC07 heavy chain variants disclosed herein (such as the antibody heavy chains described in the above section) to generate a monoclonal antibody that specifically binds to gp120 and is neutralizing. In some embodiments, the light chain can be complemented with the heavy chain of a known VRC01-like antibody (for example the heavy chain of VRC01, NIH4546, or NIH4546 G54W) to generate a monoclonal antibody that specifically binds to gp120 and is neutralizing. In several embodiments, the antibody is not self-reactive, and/or has low self-reactivity. In additional embodiments, the antibody is not immunogenic and/or has low immunogenicity.

VRC01hpL06 E1/I2 Deletion/V3S

[0347] In some embodiments the antibody includes a heavy chain variable domain and a light chain variable domain, wherein the light chain variable domain includes the amino acid sequence set forth as SEQ ID NO: 238, wherein X₁ is no amino acid; X₂ is no amino acid; X₃ is S; X₄ is E; X₅ is K; X₆ is E; X₇ is E; X₈ is E; X₉ is R; X₁₀ is R; X₁₁ is F; X₁₂ is Q; X₁₃ is N (VRC01hpL06 E1/I2 deletion/V3S light chain; SEQ ID NO: 236). The light chain can be complemented with VRC07 heavy chain or any of the VRC07 heavy chain variants disclosed herein (such as the antibody heavy chains described in the above section) to generate a monoclonal antibody that specifically binds to gp120 and is neutralizing. In some embodiments, the light chain can be complemented with the heavy chain of a known VRC01-like antibody (for example the heavy chain of VRC01, NIH4546, or NIH4546 G54W) to generate a monoclonal antibody that specifically binds to gp120 and is neutralizing. In several embodiments, the antibody is not self-reactive, and/or has low self-reactivity. In additional embodiments, the antibody is not immunogenic and/or has low immunogenicity.

VRC01hpL04 E1/I2 Deletion/V3E

[0348] In some embodiments the antibody includes a heavy chain variable domain and a light chain variable domain, wherein the light chain variable domain includes the amino acid sequence set forth as SEQ ID NO: 238, wherein X₁ is no amino acid; X₂ is no amino acid; X₃ is E; X₄ is Q; X₅ is S; X₆ is S; X₇ is N; X₈ is D; X₉ is T; X₁₀ is T; X₁₁ is F; X₁₂ is V; X₁₃ is I (VRC01hpL04 E1/I2 deletion/V3E light chain; SEQ ID NO: 237). The light chain can be complemented with VRC07 heavy chain or any of the VRC07 heavy chain variants disclosed herein (such as the antibody heavy chains described in the above section) to generate a monoclonal antibody that specifically binds to gp120 and is neutralizing. In some embodiments, the light chain can be complemented with the heavy chain of a known VRC01-like antibody (for example the heavy chain of VRC01, NIH4546, or NIH4546 G54W) to generate a monoclonal antibody that specifically binds to gp120 and is neutralizing. In several embodiments, the antibody is not self-reactive, and/or has low self-reactivity. In additional embodiments, the antibody is not immunogenic and/or has low immunogenicity.

### VRC01L E1/I2 Deletion

[0349] In some embodiments the antibody includes a heavy chain variable domain and a light chain variable domain, wherein the light chain variable domain includes the amino acid sequence set forth as SEQ ID NO: 238, wherein X₁ is no amino acid; X₂ is no amino acid; X₃ is V; X₄ is I; X₅ is S; X₆ is S; X₇ is W; X₈ is D; X₉ is N; X₁₀ is T; X₁₁ is F; X₁₂ is V; X₁₃ is I (VRC01L E1/I2 deletion; SEQ ID NO: 53). The light chain can be complemented with any of the VRC07 heavy chain variants disclosed herein (such as the antibody heavy chains described in the above section) to generate a monoclonal antibody that specifically binds to gp120 and is neutralizing. In several embodiments, the antibody is not self-reactive, and/or has low self-reactivity. In additional embodiments, the antibody is not immunogenic and/or has low immunogenicity.

VRC01hpL02

[0350] In some embodiments the antibody includes a heavy chain variable domain and a light chain variable domain, wherein the light chain variable domain includes the amino acid sequence set forth as SEQ ID NO: 238, wherein X₁ is E; X₂ is I; X₃ is S; X₄ is T; X₅ is S; X₆ is S; X₇ is S; X₈ is D; X₉ is T; X₁₀ is T; X₁₁ is F; X₁₂ is Q; X₁₃ is N (VRC01hpL02; SEQ ID NO: 50). The light chain can be complemented with VRC07 heavy chain or any of the VRC07 heavy chain variants disclosed herein (such as the antibody heavy chains described in the above section) to generate a monoclonal antibody that specifically binds to gp120 and is neutralizing. In some embodiments, the light chain can be complemented with the heavy chain of a known VRC01-like antibody (for example the heavy chain of VRC01, NIH4546, or NIH4546 G54W) to generate a monoclonal antibody that specifically binds to gp120 and is neutralizing.

VRC01-Like Light Chains with E1/E2 Deletion

[0351] The person of ordinary skill in the art will appreciate that deletion of the first two amino acids of the VRC07 light chain variable domain disclosed herein can be included on other VRC01-like antibodies, to generate a monoclonal antibody with improved binding affinity of gp120, but which does not have increased self-reactivity, compared to the VRC01-like antibody in the absence of the deletion of the first two amino acids of the light chain. Accordingly, in some embodiments, an isolated VRC01-like monoclonal antibody is provided, wherein the antibody includes a VRC01-like heavy chain and a VRC01-like light chain, wherein the light chain further includes deletion of the first two amino acids of the light chain, wherein the antibody specifically binds gp120 of HIV-1, and wherein the antibody is neutralizing. In some embodiments, the deletion includes and E1, I2 deletion. Non-limiting examples of VRC01-like monoclonal antibody light chain variable domains that can be modified with the deletion of the first two amino acids of the light chain include the light chain variable domains of the VRC01, VRC02, VRC03, NIH4546, NIH4546 G54W, VRC-PG04, VRC-PG04b, VRC-CH30, VRC-CH31, VRC-CH32, VRC-CH33, VRC-CH34, 3BNC60, 3BNC117, 12A12, 12A21, 1NC9, 1B2530, 8ANC131 or 8ANC134 monoclonal antibodies. The sequence of accession numbers of the heavy chain variable domains of these antibodies are familiar to the person of ordinary skill in the art and provided herein.

[0352] c. Exemplary Combinations of Heavy and Light Chains

[0353] The person of ordinary skill in the art will appreciate that the disclosed heavy and light chain variable domains can be included on heavy and light chains and cross-complemented to generate a monoclonal antibody that specifically binds to gp120 and is neutralizing. In several embodiments, the disclosed antibodies have increased binding affinity for gp120 compared to VRC01, but are not self-reactive, and/or have low self-reactivity. In additional embodiments, the antibody is not immunogenic and/or has low immunogenicity.

[0354] For example, in some embodiments, the antibody includes a heavy chain variable domain and a light chain variable domain, wherein the antibody specifically binds gp120, and wherein the antibody is neutralizing, wherein the heavy chain variable domain includes amino acids 31-35 (CDR1), 50-66 (CDR2) and/or 99-114 (CDR3) of SEQ ID NO: 40 (Kabat), and the light chain variable domain of the antibody includes amino acids 24-32 (CDR1), 48-54 (CDR2) and/or 87-91 (CDR3) of SEQ ID NO: 238 (Kabat). In some embodiments, the antibody includes a heavy chain variable domain and a light chain variable domain, wherein the antibody specifically binds gp120, and wherein the antibody is neutralizing, wherein the heavy chain variable domain includes amino acids 31-35 (CDR1), 50-66 (CDR2) and 99-114 (CDR3) of SEQ ID NO: 40 (Kabat), and the light chain variable domain of the antibody includes amino acids 24-32 (CDR1), 48-54 (CDR2) and 87-91 (CDR3) of SEQ ID NO: 238 (Kabat).

[0355] In some embodiments, the antibody includes a heavy chain variable domain and a light chain variable domain, wherein the antibody specifically binds gp120, and wherein the antibody is neutralizing, wherein the heavy chain variable domain includes amino acids 26-33 (CDR1), 51-58 (CDR2) and/or 97-114 (CDR3) of SEQ ID NO: 40 (IMGT), and the light chain variable domain of the antibody includes amino acids 27-30 (CDR1), 48-50 (CDR2) and/or 87-91 (CDR3) of SEQ ID NO: 238 (IMGT). In some embodiments, the antibody includes a heavy chain variable domain and a light chain variable domain, wherein the antibody specifically binds gp120, and wherein the antibody is neutralizing, wherein the heavy chain variable domain includes amino acids 26-33 (CDR1), 51-58 (CDR2) and 97-114 (CDR3) of SEQ ID NO: 40 (IMGT), and the light chain variable domain of the antibody includes amino acids 27-30 (CDR1), 48-50 (CDR2) and 87-91 (CDR3) of SEQ ID NO: 238 (IMGT). In several embodiments, the antibody is not self-reactive, and/or has low self-reactivity. In additional embodiments, the antibody is not immunogenic and/or has low immunogenicity.

[0356] In additional embodiments, the antibody includes a heavy chain variable domain and a light chain variable domain, wherein the heavy chain variable domain includes amino acids 26-33 (CDR1), 51-58 (CDR2) and 97-114 (CDR3) of SEQ ID NO: 40 (IMGT), wherein X₂ is G, wherein the light chain variable domain includes amino acids 27-30 (CDR1), 48-50 (CDR2) and 87-91 (CDR3) of SEQ ID NO: 238, wherein X₁₁ is F, wherein the antibody specifically binds gp120, and wherein the antibody is neutralizing. In additional embodiments, the antibody includes a heavy chain variable domain and a light chain variable domain, wherein the heavy chain variable domain includes amino acids 26-33 (CDR1), 51-58 (CDR2) and 97-114 (CDR3) of SEQ ID NO: 40 (IMGT), wherein X₂ is G, wherein the light chain variable domain includes amino acids 27-30 (CDR1), 48-50 (CDR2) and 87-91 (CDR3) of SEQ ID NO: 238, wherein X₁₁ is D, wherein the antibody specifically binds gp120, and wherein the antibody is neutralizing. In additional embodiments, the antibody includes a heavy chain variable domain and a light chain variable domain, wherein the heavy chain variable domain includes amino acids 26-33 (CDR1), 51-58 (CDR2) and 97-114 (CDR3) of SEQ ID NO: 40 (IMGT), wherein X₂ is G, wherein the light chain variable domain includes amino acids 27-30 (CDR1), 48-50 (CDR2) and 87-91 (CDR3) of SEQ ID NO: 238, wherein X₁₁ is K, wherein the antibody specifically binds gp120, and wherein the antibody is neutralizing. In additional embodiments, the antibody includes a heavy chain variable domain and a light chain variable domain, wherein the heavy chain variable domain includes amino acids 26-33 (CDR1), 51-58 (CDR2) and 97-114 (CDR3) of SEQ ID NO: 40 (IMGT), wherein X₂ is G, wherein the light chain variable domain includes amino acids 27-30 (CDR1), 48-50 (CDR2) and 87-91 (CDR3) of SEQ ID NO: 238, wherein X₁₁ is S, wherein the antibody specifically binds gp120, and wherein the antibody is neutralizing. In additional embodiments, the antibody includes a heavy chain variable domain and a light chain variable domain, wherein the heavy chain variable domain includes amino acids 26-33 (CDR1), 51-58 (CDR2) and 97-114 (CDR3) of SEQ ID NO: 40 (IMGT), wherein X₂ is G, wherein the light chain variable domain includes amino acids 27-30 (CDR1), 48-50 (CDR2) and 87-91 (CDR3) of SEQ ID NO: 238, wherein X₁₁ is H, wherein the antibody specifically binds gp120, and wherein the antibody is neutralizing. In several embodiments, the antibody is not self-reactive, and/or has low self-reactivity. In additional embodiments, the antibody is not immunogenic and/or has low immunogenicity.

[0357] In additional embodiments, the antibody includes a heavy chain variable domain and a light chain variable domain, wherein the heavy chain variable domain includes amino acids 26-33 (CDR1), 51-58 (CDR2) and 97-114 (CDR3) of SEQ ID NO: 40 (IMGT), wherein X₂ is H, wherein the light chain variable domain includes amino acids 27-30 (CDR1), 48-50 (CDR2) and 87-91 (CDR3) of SEQ ID NO: 238, wherein X₁₁ is F, wherein the antibody specifically binds gp120, and wherein the antibody is neutralizing. In additional embodiments, the antibody includes a heavy chain variable domain and a light chain variable domain, wherein the heavy chain variable domain includes amino acids 26-33 (CDR1), 51-58 (CDR2) and 97-114 (CDR3) of SEQ ID NO: 40 (IMGT), wherein X₂ is H, wherein the light chain variable domain includes amino acids 27-30 (CDR1), 48-50 (CDR2) and 87-91 (CDR3) of SEQ ID NO: 238, wherein X₁₁ is D, wherein the antibody specifically binds gp120, and wherein the antibody is neutralizing. In additional embodiments, the antibody includes a heavy chain variable domain and a light chain variable domain, wherein the heavy chain variable domain includes amino acids 26-33 (CDR1), 51-58 (CDR2) and 97-114 (CDR3) of SEQ ID NO: 40 (IMGT), wherein X₂ is H, wherein the light chain variable domain includes amino acids 27-30 (CDR1), 48-50 (CDR2) and 87-91 (CDR3) of SEQ ID NO: 238, wherein X₁₁ is K, wherein the antibody specifically binds gp120, and wherein the antibody is neutralizing. In additional embodiments, the antibody includes a heavy chain variable domain and a light chain variable domain, wherein the heavy chain variable domain includes amino acids 26-33 (CDR1), 51-58 (CDR2) and 97-114 (CDR3) of SEQ ID NO: 40 (IMGT), wherein X₂ is H, wherein the light chain variable domain includes amino acids 27-30 (CDR1), 48-50 (CDR2) and 87-91 (CDR3) of SEQ ID NO: 238, wherein X₁₁ is S, wherein the antibody specifically binds gp120, and wherein the antibody is neutralizing. In additional embodiments, the antibody includes a heavy chain variable domain and a light chain variable domain, wherein the heavy chain variable domain includes amino acids 26-33 (CDR1), 51-58 (CDR2) and 97-114 (CDR3) of SEQ ID NO: 40 (IMGT), wherein X₂ is H, wherein the light chain variable domain includes amino acids 27-30 (CDR1), 48-50 (CDR2) and 87-91 (CDR3) of SEQ ID NO: 238, wherein X₁₁ is H, wherein the antibody specifically binds gp120, and wherein the antibody is neutralizing. In several embodiments, the antibody is not self-reactive, and/or has low self-reactivity. In additional embodiments, the antibody is not immunogenic and/or has low immunogenicity.

[0358] In additional embodiments, the antibody includes a heavy chain variable domain and a light chain variable domain, wherein the heavy chain variable domain includes amino acids 31-35 (CDR1), 50-66 (CDR2) and/or 99-114 (CDR3) of SEQ ID NO: 40 (Kabat), wherein X₂ is G and X₃ is S, wherein the light chain variable domain includes amino acids 24-32 (CDR1), 48-54 (CDR2) and/or 87-91 (CDR3) of SEQ ID NO: 238 (Kabat), wherein X₁₁ is F, wherein the antibody specifically binds gp120, and wherein the antibody is neutralizing. In additional embodiments, the antibody includes a heavy chain variable domain and a light chain variable domain, wherein the heavy chain variable domain includes amino acids 31-35 (CDR1), 50-66 (CDR2) and/or 99-114 (CDR3) of SEQ ID NO: 40 (Kabat), wherein X₂ is G and X₃ is S, wherein the light chain variable domain includes amino acids 24-32 (CDR1), 48-54 (CDR2) and/or 87-91 (CDR3) of SEQ ID NO: 238 (Kabat), wherein X₁₁ is D, wherein the antibody specifically binds gp120, and wherein the antibody is neutralizing. In additional embodiments, the antibody includes a heavy chain variable domain and a light chain variable domain, wherein the heavy chain variable domain includes amino acids 31-35 (CDR1), 50-66 (CDR2) and/or 99-114 (CDR3) of SEQ ID NO: 40 (Kabat), wherein X₂ is G and X₃ is S, wherein the light chain variable domain includes amino acids 24-32 (CDR1), 48-54 (CDR2) and/or 87-91 (CDR3) of SEQ ID NO: 238 (Kabat), wherein X₁₁ is K, wherein the antibody specifically binds gp120, and wherein the antibody is neutralizing. In additional embodiments, the antibody includes a heavy chain variable domain and a light chain variable domain, wherein the heavy chain variable domain includes amino acids 31-35 (CDR1), 50-66 (CDR2) and/or 99-114 (CDR3) of SEQ ID NO: 40 (Kabat), wherein X₂ is G and X₃ is S, wherein the light chain variable domain includes amino acids 24-32 (CDR1), 48-54 (CDR2) and/or 87-91 (CDR3) of SEQ ID NO: 238 (Kabat), wherein X₁₁ is S, wherein the antibody specifically binds gp120, and wherein the antibody is neutralizing. In additional embodiments, the antibody includes a heavy chain variable domain and a light chain variable domain, wherein the heavy chain variable domain includes amino acids 31-35 (CDR1), 50-66 (CDR2) and/or 99-114 (CDR3) of SEQ ID NO: 40 (Kabat), wherein X₂ is G and X₃ is S, wherein the light chain variable domain includes amino acids 24-32 (CDR1), 48-54 (CDR2) and/or 87-91 (CDR3) of SEQ ID NO: 238 (Kabat), wherein X₁₁ is H, wherein the antibody specifically binds gp120, and wherein the antibody is neutralizing. In several embodiments, the antibody is not self-reactive, and/or has low self-reactivity. In additional embodiments, the antibody is not immunogenic and/or has low immunogenicity.

[0359] In additional embodiments, the antibody includes a heavy chain variable domain and a light chain variable domain, wherein the heavy chain variable domain includes amino acids 31-35 (CDR1), 50-66 (CDR2) and/or 99-114 (CDR3) of SEQ ID NO: 40 (Kabat), wherein X₂ is H and X₃ is S, wherein the light chain variable domain includes amino acids 24-32 (CDR1), 48-54 (CDR2) and/or 87-91 (CDR3) of SEQ ID NO: 238 (Kabat), wherein X₁₁ is F, wherein the antibody specifically binds gp120, and wherein the antibody is neutralizing. In additional embodiments, the antibody includes a heavy chain variable domain and a light chain variable domain, wherein the heavy chain variable domain includes amino acids 31-35 (CDR1), 50-66 (CDR2) and/or 99-114 (CDR3) of SEQ ID NO: 40 (Kabat), wherein X₂ is H and X₃ is S, wherein the light chain variable domain includes amino acids 24-32 (CDR1), 48-54 (CDR2) and/or 87-91 (CDR3) of SEQ ID NO: 238 (Kabat), wherein X₁₁ is D, wherein the antibody specifically binds gp120, and wherein the antibody is neutralizing. In additional embodiments, the antibody includes a heavy chain variable domain and a light chain variable domain, wherein the heavy chain variable domain includes amino acids 31-35 (CDR1), 50-66 (CDR2) and/or 99-114 (CDR3) of SEQ ID NO: 40 (Kabat), wherein X₂ is H and X₃ is S, wherein the light chain variable domain includes amino acids 24-32 (CDR1), 48-54 (CDR2) and/or 87-91 (CDR3) of SEQ ID NO: 238 (Kabat), wherein X₁₁ is K, wherein the antibody specifically binds gp120, and wherein the antibody is neutralizing. In additional embodiments, the antibody includes a heavy chain variable domain and a light chain variable domain, wherein the heavy chain variable domain includes amino acids 31-35 (CDR1), 50-66 (CDR2) and/or 99-114 (CDR3) of SEQ ID NO: 40 (Kabat), wherein X₂ is H and X₃ is S, wherein the light chain variable domain includes amino acids 24-32 (CDR1), 48-54 (CDR2) and/or 87-91 (CDR3) of SEQ ID NO: 238 (Kabat), wherein X₁₁ is S, wherein the antibody specifically binds gp120, and wherein the antibody is neutralizing. In additional embodiments, the antibody includes a heavy chain variable domain and a light chain variable domain, wherein the heavy chain variable domain includes amino acids 31-35 (CDR1), 50-66 (CDR2) and/or 99-114 (CDR3) of SEQ ID NO: 40 (Kabat), wherein X₂ is H and X₃ is S, wherein the light chain variable domain includes amino acids 24-32 (CDR1), 48-54 (CDR2) and/or 87-91 (CDR3) of SEQ ID NO: 238 (Kabat), wherein X₁₁ is H, wherein the antibody specifically binds gp120, and wherein the antibody is neutralizing. In several embodiments, the antibody is not self-reactive, and/or has low self-reactivity. In additional embodiments, the antibody is not immunogenic and/or has low immunogenicity.

[0360] In additional embodiments, the antibody includes a heavy chain variable domain and a light chain variable domain, wherein the heavy chain variable domain includes amino acids 31-35 (CDR1), 50-66 (CDR2) and/or 99-114 (CDR3) of SEQ ID NO: 40 (Kabat), wherein X₂ is G and X₃ is N, wherein the light chain variable domain includes amino acids 24-32 (CDR1), 48-54 (CDR2) and/or 87-91 (CDR3) of SEQ ID NO: 238 (Kabat), wherein X₁₁ is F, wherein the antibody specifically binds gp120, and wherein the antibody is neutralizing. In additional embodiments, the antibody includes a heavy chain variable domain and a light chain variable domain, wherein the heavy chain variable domain includes amino acids 31-35 (CDR1), 50-66 (CDR2) and/or 99-114 (CDR3) of SEQ ID NO: 40 (Kabat), wherein X₂ is G and X₃ is N, wherein the light chain variable domain includes amino acids 24-32 (CDR1), 48-54 (CDR2) and/or 87-91 (CDR3) of SEQ ID NO: 238 (Kabat), wherein X₁₁ is D, wherein the antibody specifically binds gp120, and wherein the antibody is neutralizing. In additional embodiments, the antibody includes a heavy chain variable domain and a light chain variable domain, wherein the heavy chain variable domain includes amino acids 31-35 (CDR1), 50-66 (CDR2) and/or 99-114 (CDR3) of SEQ ID NO: 40 (Kabat), wherein X₂ is G and X₃ is N, wherein the light chain variable domain includes amino acids 24-32 (CDR1), 48-54 (CDR2) and/or 87-91 (CDR3) of SEQ ID NO: 238 (Kabat), wherein X₁₁ is K, wherein the antibody specifically binds gp120, and wherein the antibody is neutralizing. In additional embodiments, the antibody includes a heavy chain variable domain and a light chain variable domain, wherein the heavy chain variable domain includes amino acids 31-35 (CDR1), 50-66 (CDR2) and/or 99-114 (CDR3) of SEQ ID NO: 40 (Kabat), wherein X₂ is G and X₃ is N, wherein the light chain variable domain includes amino acids 24-32 (CDR1), 48-54 (CDR2) and/or 87-91 (CDR3) of SEQ ID NO: 238 (Kabat), wherein X₁₁ is S, wherein the antibody specifically binds gp120, and wherein the antibody is neutralizing. In additional embodiments, the antibody includes a heavy chain variable domain and a light chain variable domain, wherein the heavy chain variable domain includes amino acids 31-35 (CDR1), 50-66 (CDR2) and/or 99-114 (CDR3) of SEQ ID NO: 40 (Kabat), wherein X₂ is G and X₃ is N, wherein the light chain variable domain includes amino acids 24-32 (CDR1), 48-54 (CDR2) and/or 87-91 (CDR3) of SEQ ID NO: 238 (Kabat), wherein X₁₁ is H, wherein the antibody specifically binds gp120, and wherein the antibody is neutralizing. In several embodiments, the antibody is not self-reactive, and/or has low self-reactivity. In additional embodiments, the antibody is not immunogenic and/or has low immunogenicity.

[0361] In additional embodiments, the antibody includes a heavy chain variable domain and a light chain variable domain, wherein the heavy chain variable domain includes amino acids 31-35 (CDR1), 50-66 (CDR2) and/or 99-114 (CDR3) of SEQ ID NO: 40 (Kabat), wherein X₂ is H and X₃ is N, wherein the light chain variable domain includes amino acids 24-32 (CDR1), 48-54 (CDR2) and/or 87-91 (CDR3) of SEQ ID NO: 238 (Kabat), wherein X₁₁ is F, wherein the antibody specifically binds gp120, and wherein the antibody is neutralizing. In additional embodiments, the antibody includes a heavy chain variable domain and a light chain variable domain, wherein the heavy chain variable domain includes amino acids 31-35 (CDR1), 50-66 (CDR2) and/or 99-114 (CDR3) of SEQ ID NO: 40 (Kabat), wherein X₂ is H and X₃ is N, wherein the light chain variable domain includes amino acids 24-32 (CDR1), 48-54 (CDR2) and/or 87-91 (CDR3) of SEQ ID NO: 238 (Kabat), wherein X₁₁ is D, wherein the antibody specifically binds gp120, and wherein the antibody is neutralizing. In additional embodiments, the antibody includes a heavy chain variable domain and a light chain variable domain, wherein the heavy chain variable domain includes amino acids 31-35 (CDR1), 50-66 (CDR2) and/or 99-114 (CDR3) of SEQ ID NO: 40 (Kabat), wherein X₂ is H and X₃ is N, wherein the light chain variable domain includes amino acids 24-32 (CDR1), 48-54 (CDR2) and/or 87-91 (CDR3) of SEQ ID NO: 238 (Kabat), wherein X₁₁ is K, wherein the antibody specifically binds gp120, and wherein the antibody is neutralizing. In additional embodiments, the antibody includes a heavy chain variable domain and a light chain variable domain, wherein the heavy chain variable domain includes amino acids 31-35 (CDR1), 50-66 (CDR2) and/or 99-114 (CDR3) of SEQ ID NO: 40 (Kabat), wherein X₂ is H and X₃ is N, wherein the light chain variable domain includes amino acids 24-32 (CDR1), 48-54 (CDR2) and/or 87-91 (CDR3) of SEQ ID NO: 238 (Kabat), wherein X₁₁ is S, wherein the antibody specifically binds gp120, and wherein the antibody is neutralizing. In additional embodiments, the antibody includes a heavy chain variable domain and a light chain variable domain, wherein the heavy chain variable domain includes amino acids 31-35 (CDR1), 50-66 (CDR2) and/or 99-114 (CDR3) of SEQ ID NO: 40 (Kabat), wherein X₂ is H and X₃ is N, wherein the light chain variable domain includes amino acids 24-32 (CDR1), 48-54 (CDR2) and/or 87-91 (CDR3) of SEQ ID NO: 238 (Kabat), wherein X₁₁ is H, wherein the antibody specifically binds gp120, and wherein the antibody is neutralizing. In several embodiments, the antibody is not self-reactive, and/or has low self-reactivity. In additional embodiments, the antibody is not immunogenic and/or has low immunogenicity.

[0362] For example, in some embodiments, the antibody includes a heavy chain variable domain and a light chain variable domain, wherein the heavy chain variable domain includes amino acids 26-33 (CDR1), 51-58 (CDR2) and 97-114 (CDR3) of SEQ ID NO: 196 (NIH4546 heavy chain variable domain, IMGT CDRs), further including a glycine to histidine substitution at Kabat position 54 (a G54H substitution), and wherein the light chain variable domain includes amino acids 27-30 (CDR1), 48-50 (CDR2) and 87-91 (CDR3) of SEQ ID NO: 215 (IMGT), wherein the antibody specifically binds gp120, and wherein the antibody is neutralizing. In some embodiments, the antibody includes a heavy chain variable domain and a light chain variable domain, wherein the heavy chain variable domain includes amino acids 26-33 (CDR1), 51-58 (CDR2) and 97-114 (CDR3) of SEQ ID NO: 196 (NIH4546 heavy chain variable domain, IMGT CDRs), further including a glycine to histidine substitution at Kabat position 54 (a G54H substitution), and wherein the light chain variable domain includes amino acids 27-30 (CDR1), 48-50 (CDR2) and 87-91 (CDR3) of SEQ ID NO: 215 (IMGT), wherein the antibody specifically binds gp120, and wherein the antibody is neutralizing. For example, in some embodiments, the antibody includes a heavy chain variable domain and a light chain variable domain, wherein the heavy chain variable domain includes amino acids 31-35 (CDR1), 50-66 (CDR2) and/or 99-114 (CDR3) of SEQ ID NO: 196 (NIH4546 heavy chain variable domain, Kabat CDRs), further including a glycine to histidine substitution at Kabat position 54 (a G54H substitution), and wherein the light chain variable domain includes amino acids 24-32 (CDR1), 48-54 (CDR2) and/or 87-91 (CDR3) of SEQ ID NO: 215 (Kabat), wherein the antibody specifically binds gp120, and wherein the antibody is neutralizing. In some embodiments, the antibody includes a heavy chain variable domain and a light chain variable domain, wherein the heavy chain variable domain includes amino acids 31-35 (CDR1), 50-66 (CDR2) and/or 99-114 (CDR3) of SEQ ID NO: 196 (NIH4546 heavy chain variable domain, Kabat CDRs), further including a glycine to histidine substitution at Kabat position 54 (a G54H substitution), and wherein the light chain variable domain includes amino acids 24-32 (CDR1), 48-54 (CDR2) and/or 87-91 (CDR3) of SEQ ID NO: 215 (Kabat), wherein the antibody specifically binds gp120, and wherein the antibody is neutralizing. In further embodiments, the antibody includes a heavy chain variable domain and a light chain variable domain, wherein the heavy chain variable domain includes the amino acid sequence set forth as SEQ ID NO: 196 (NIH4546 heavy chain variable domain), further including a glycine to histidine substitution at Kabat position 54 (a G54H substitution), and wherein the light chain variable domain includes the amino acid sequence set forth as SEQ ID NO: 215 (Kabat), wherein the antibody specifically binds gp120, and wherein the antibody is neutralizing. In several embodiments, the antibody is not self-reactive, and/or has low self-reactivity. In additional embodiments, the antibody is not immunogenic and/or has low immunogenicity.

[0363] In some embodiments, the antibody includes a heavy chain variable domain and a light chain variable domain, wherein the antibody specifically binds gp120, and wherein the antibody is neutralizing, wherein the heavy chain variable domain includes the amino acid sequence of SEQ ID NO: 40, wherein X₁ is I, X₂ is H, X₃ is S and X₄ is T (VRC07 G54H; SEQ ID NO: 32) and wherein the light chain variable domain includes a light chain variable domain as described herein, or a known VRC01-like light chain variable domain. In several embodiments, the antibody is not self-reactive, and/or has low self-reactivity. In additional embodiments, the antibody is not immunogenic and/or has low immunogenicity. For example, in some embodiments, the antibody includes a heavy chain variable domain and a light chain variable domain, wherein the antibody specifically binds gp120, and wherein the antibody is neutralizing, wherein the heavy chain variable domain of the antibody includes SEQ ID NO: 40, wherein X₁ is I, X₂ is H, X₃ is S and X₄ is T (VRC07 G54H; SEQ ID NO: 32), and the light chain of the antibody includes:

[0364] (a) SEQ ID NO: 238, wherein X₁ is E; X₂ is I; X₃ is V; X₄ is I; X₅ is S; X₆ is S; X₇ is W; X₈ is D; X₉ is N; X₁₀ is T; X₁₁ is F; X₁₂ is V; X₁₃ is I (VRC01 light chain; SEQ ID NO: 9);

[0365] (b) SEQ ID NO: 238, wherein X₁ is no amino acid; X₂ is no amino acid; X₃ is E; X₄ is I; X₅ is S; X₆ is S; X₇ is W; X₈ is D; X₉ is N; X₁₀ is T; X₁₁ is F; X₁₂ is V; and X₁₃ is I (VRC01L E1/I2del-V3E; SEQ ID NO: 219);

[0366] (c) SEQ ID NO: 238, wherein X₁ is no amino acid; X₂ is no amino acid; X₃ is K; X₄ is I; X₅ is S; X₆ is S; X₇ is W; X₈ is D; X₉ is N; X₁₀ is T; X₁₁ is F; X₁₂ is V; and X₁₃ is I (VRC01L V3K light chain; SEQ ID NO: 220);

[0367] (d) SEQ ID NO: 238, wherein X₁ is no amino acid; X₂ is no amino acid; X₃ is S; X₄ is I; X₅ is S; X₆ is S; X₇ is W; X₈ is D; X₉ is N; X₁₀ is T; X₁₁ is F; X₁₂ is V; and X₁₃ is I (VRC01L E1/I2del V3S light chain; SEQ ID NO: 221);

[0368] (e) SEQ ID NO: 238, wherein X₁ is no amino acid; X₂ is no amino acid; X₃ is V; X₄ is I; X₅ is S; X₆ is S; X₇ is W; X₈ is D; X₉ is N; X₁₀ is T; X₁₁ is D; X₁₂ is V; and X₁₃ is I (VRC01L E1/I2del F97D; SEQ ID NO: 222);

[0369] (f) SEQ ID NO: 238, wherein X₁ is no amino acid; X₂ is no amino acid; X₃ is V; X₄ is I; X₅ is S; X₆ is S; X₇ is W; X₈ is D; X₉ is N; X₁₀ is T; X₁₁ is K; X₁₂ is V; and X₁₃ is I (VRC01L E1/I2del F97K; SEQ ID NO: 223);

[0370] (g) SEQ ID NO: 238, wherein X₁ is no amino acid; X₂ is no amino acid; X₃ is V; X₄ is I; X₅ is S; X₆ is S; X₇ is W; X₈ is D; X₉ is N; X₁₀ is T; X₁₁ is S; X₁₂ is V; and X₁₃ is I (VRC01L E1/I2del F97S; SEQ ID NO: 224);

[0371] (h) SEQ ID NO: 238, wherein X₁ is no amino acid; X₂ is no amino acid; X₃ is V; X₄ is I; X₅ is S; X₆ is S; X₇ is W; X₈ is D; X₉ is N; X₁₀ is T; X₁₁ is H; X₁₂ is V; and X₁₃ is I (VRC01L E1/I2del F97H; SEQ ID NO: 225);

[0372] (i) SEQ ID NO: 238, wherein X₁ is no amino acid; X₂ is no amino acid; X₃ is E; X₄ is I; X₅ is S; X₆ is S; X₇ is W; X₈ is D; X₉ is N; X₁₀ is T; X₁₁ is S; X₁₂ is V; and X₁₃ is I (VRC01L E1/I2del V3E/F97S; SEQ ID NO: 226);

[0373] (j) SEQ ID NO: 238, wherein X₁ is no amino acid; X₂ is no amino acid; X₃ is E; X₄ is I; X₅ is S; X₆ is S; X₇ is W; X₈ is D; X₉ is N; X₁₀ is T; X₁₁ is H; X₁₂ is V; and X₁₃ is I (VRC01L E1/I2del V3E/F97H; SEQ ID NO: 227);

[0374] (k) SEQ ID NO: 238, wherein X₁ is no amino acid; X₂ is no amino acid; X₃ is V; X₄ is I; X₅ is S; X₆ is S; X₇ is S; X₈ is D; X₉ is T; X₁₀ is T; X₁₁ is F; X₁₂ is V; and X₁₃ is I (VRC01hpL03; SEQ ID NO: 228);

[0375] (l) SEQ ID NO: 238, wherein X₁ is no amino acid; X₂ is no amino acid; X₃ is V; X₄ is Q; X₅ is S; X₆ is S; X₇ is N; X₈ is D; X₉ is T; X₁₀ is T; X₁₁ is F; X₁₂ is V; and X₁₃ is I (VRC01hpL04; SEQ ID NO: 229);

[0376] (m) SEQ ID NO: 238, wherein X₁ is no amino acid; X₂ is no amino acid; X₃ is V; X₄ is Q; X₅ is S; X₆ is S; X₇ is N; X₈ is D; X₉ is T; X₁₀ is T; X₁₁ is F; X₁₂ is Q; and X₁₃ is N (VRC01hpL05; SEQ ID NO: 230);

[0377] (n) SEQ ID NO: 238, wherein X₁ is no amino acid; X₂ is no amino acid; X₃ is V; X₄ is E; X₅ is K; X₆ is E; X₇ is E; X₈ is E; X₉ is R; X₁₀ is R; X₁₁ is F; X₁₂ is Q; and X₁₃ is N (VRC01hpL06; SEQ ID NO: 231); (o) SEQ ID NO: 238, wherein X₁ is no amino acid; X₂ is no amino acid; X₃ is S; X₄ is T; X₅ is S; X₆ is S; X₇ is S; X₈ is D; X₉ is T; X₁₀ is T; X₁₁ is F; X₁₂ is Q; and X₁₃ is N (VRC01hpL02 E1/I2 deletion/V3S; SEQ ID NO: 232);

[0378] (p) SEQ ID NO: 238, wherein X₁ is no amino acid; X₂ is no amino acid; X₃ is S; X₄ is I; X₅ is S; X₆ is S; X₇ is S; X₈ is D; X₉ is T; X₁₀ is T; X₁₁ is F; X₁₂ is V; and X₁₃ is I (VRC01hpL03 E1/I2 deletion/V3S; SEQ ID NO: 233);

[0379] (q) SEQ ID NO: 238, wherein X₁ is no amino acid; X₂ is no amino acid; X₃ is S; X₄ is Q; X₅ is S; X₆ is S; X₇ is N; X₈ is D; X₉ is T; X₁₀ is T; X₁₁ is F; X₁₂ is V; and X₁₃ is I (VRC01hpL04 E1/I2 deletion/V3S; SEQ ID NO: 234);

[0380] (r) SEQ ID NO: 238, wherein X₁ is no amino acid; X₂ is no amino acid; X₃ is S; X₄ is Q; X₅ is S; X₆ is S; X₇ is N; X₈ is D; X₉ is T; X₁₀ is T; X₁₁ is F; X₁₂ is Q; and X₁₃ is N (VRC01hpL05 E1/I2 deletion/V3S; SEQ ID NO: 235);

[0381] (s) SEQ ID NO: 238, wherein X₁ is no amino acid; X₂ is no amino acid; X₃ is S; X₄ is E; X₅ is K; X₆ is E; X₇ is E; X₈ is E; X₉ is R; X₁₀ is R; X₁₁ is F; X₁₂ is Q; and X₁₃ is N (VRC01hpL06 E1/I2 deletion/V3S; SEQ ID NO: 236);

[0382] (t) SEQ ID NO: 238, wherein X₁ is no amino acid; X₂ is no amino acid; X₃ is E; X₄ is Q; X₅ is S; X₆ is S; X₇ is N; X₈ is D; X₉ is T; X₁₀ is T; X₁₁ is F; X₁₂ is V; and X₁₃ is I (VRC01hpL04 E1/I2 deletion/V3E; SEQ ID NO: 237);

[0383] (u) SEQ ID NO: 238, wherein X₁ is no amino acid; X₂ is no amino acid; X₃ is V; X₄ is I; X₅ is S; X₆ is S; X₇ is W; X₈ is D; X₉ is N; X₁₀ is T; X₁₁ is F; X₁₂ is V; and X₁₃ is I (VRC01 E1/I2 deletion; SEQ ID NO: 53); or

[0384] (v) SEQ ID NO: 238, wherein X₁ is no amino acid; X₂ is no amino acid; X₃ is V; X₄ is T; X₅ is S; X₆ is S; X₇ is S; X₈ is D; X₉ is T; X₁₀ is T; X₁₁ is F; X₁₂ is Q; and X₁₃ is N (VRC01hpL02; SEQ ID NO: 50).

[0385] In some embodiments, the antibody includes a heavy chain variable domain and a light chain variable domain, wherein the antibody specifically binds gp120, and wherein the antibody is neutralizing, wherein the heavy chain variable domain includes the amino acid sequence of SEQ ID NO: 40, wherein X₁ is I, X₂ is H, X₃ is N and X₄ is T (VRC07 G54H, S58N), and wherein the light chain variable domain includes a light chain variable domain as described herein, or a known VRC01-like light chain variable domain. In several embodiments, the antibody is not self-reactive, and/or has low self-reactivity. In additional embodiments, the antibody is not immunogenic and/or has low immunogenicity. For example, in some embodiments, the antibody includes a heavy chain variable domain and a light chain variable domain, wherein the antibody specifically binds gp120, and wherein the antibody is neutralizing, wherein the heavy chain variable domain of the antibody includes SEQ ID NO: 40, wherein X₁ is I, X₂ is H, X₃ is N and X₄ is T (VRC07 G54H, S58N; SEQ ID NO: 258), and the light chain of the antibody includes:

[0386] (a) SEQ ID NO: 238, wherein X₁ is E; X₂ is I; X₃ is V; X₄ is I; X₅ is S; X₆ is S; X₇ is W; X₈ is D; X₉ is N; X₁₀ is T; X₁₁ is F; X₁₂ is V; X₁₃ is I (VRC01 light chain; SEQ ID NO: 9);

[0387] (b) SEQ ID NO: 238, wherein X₁ is no amino acid; X₂ is no amino acid; X₃ is E; X₄ is I; X₅ is S; X₆ is S; X₇ is W; X₈ is D; X₉ is N; X₁₀ is T; X₁₁ is F; X₁₂ is V; and X₁₃ is I (VRC01L E1/I2del-V3E; SEQ ID NO: 219);

[0388] (c) SEQ ID NO: 238, wherein X₁ is no amino acid; X₂ is no amino acid; X₃ is K; X₄ is I; X₅ is S; X₆ is S; X₇ is W; X₈ is D; X₉ is N; X₁₀ is T; X₁₁ is F; X₁₂ is V; and X₁₃ is I (VRC01L V3K light chain; SEQ ID NO: 220);

[0389] (d) SEQ ID NO: 238, wherein X₁ is no amino acid; X₂ is no amino acid; X₃ is S; X₄ is I; X₅ is S; X₆ is S; X₇ is W; X₈ is D; X₉ is N; X₁₀ is T; X₁₁ is F; X₁₂ is V; and X₁₃ is I (VRC01L E1/I2del V3S light chain; SEQ ID NO: 221);

[0390] (e) SEQ ID NO: 238, wherein X₁ is no amino acid; X₂ is no amino acid; X₃ is V; X₄ is I; X₅ is S; X₆ is S; X₇ is W; X₈ is D; X₉ is N; X₁₀ is T; X₁₁ is D; X₁₂ is V; and X₁₃ is I (VRC01L E1/I2del F97D; SEQ ID NO: 222);

[0391] (f) SEQ ID NO: 238, wherein X₁ is no amino acid; X₂ is no amino acid; X₃ is V; X₄ is I; X₅ is S; X₆ is S; X₇ is W; X₈ is D; X₉ is N; X₁₀ is T; X₁₁ is K; X₁₂ is V; and X₁₃ is I (VRC01L E1/I2del F97K; SEQ ID NO: 223);

[0392] (g) SEQ ID NO: 238, wherein X₁ is no amino acid; X₂ is no amino acid; X₃ is V; X₄ is I; X₅ is S; X₆ is S; X₇ is W; X₈ is D; X₉ is N; X₁₀ is T; X₁₁ is S; X₁₂ is V; and X₁₃ is I (VRC01L E1/I2del F97S; SEQ ID NO: 224);

[0393] (h) SEQ ID NO: 238, wherein X₁ is no amino acid; X₂ is no amino acid; X₃ is V; X₄ is I; X₅ is S; X₆ is S; X₇ is W; X₈ is D; X₉ is N; X₁₀ is T; X₁₁ is H; X₁₂ is V; and X₁₃ is I (VRC01L E1/I2del F97H; SEQ ID NO: 225);

[0394] (i) SEQ ID NO: 238, wherein X₁ is no amino acid; X₂ is no amino acid; X₃ is E; X₄ is I; X₅ is S; X₆ is S; X₇ is W; X₈ is D; X₉ is N; X₁₀ is T; X₁₁ is S; X₁₂ is V; and X₁₃ is I (VRC01L E1/I2del V3E/F97S; SEQ ID NO: 226);

[0395] (j) SEQ ID NO: 238, wherein X₁ is no amino acid; X₂ is no amino acid; X₃ is E; X₄ is I; X₅ is S; X₆ is S; X₇ is W; X₈ is D; X₉ is N; X₁₀ is T; X₁₁ is H; X₁₂ is V; and X₁₃ is I (VRC01L E1/I2del V3E/F97H; SEQ ID NO: 227);

[0396] (k) SEQ ID NO: 238, wherein X₁ is no amino acid; X₂ is no amino acid; X₃ is V; X₄ is I; X₅ is S; X₆ is S; X₇ is S; X₈ is D; X₉ is T; X₁₀ is T; X₁₁ is F; X₁₂ is V; and X₁₃ is I (VRC01hpL03; SEQ ID NO: 228);

[0397] (l) SEQ ID NO: 238, wherein X₁ is no amino acid; X₂ is no amino acid; X₃ is V; X₄ is Q; X₅ is S; X₆ is S; X₇ is N; X₈ is D; X₉ is T; X₁₀ is T; X₁₁ is F; X₁₂ is V; and X₁₃ is I (VRC01hpL04; SEQ ID NO: 229);

[0398] (m) SEQ ID NO: 238, wherein X₁ is no amino acid; X₂ is no amino acid; X₃ is V; X₄ is Q; X₅ is S; X₆ is S; X₇ is N; X₈ is D; X₉ is T; X₁₀ is T; X₁₁ is F; X₁₂ is Q; and X₁₃ is N (VRC01hpL05; SEQ ID NO: 230);

[0399] (n) SEQ ID NO: 238, wherein X₁ is no amino acid; X₂ is no amino acid; X₃ is V; X₄ is E; X₅ is K; X₆ is E; X₇ is E; X₈ is E; X₉ is R; X₁₀ is R; X₁₁ is F; X₁₂ is Q; and X₁₃ is N (VRC01hpL06; SEQ ID NO: 231);

[0400] (o) SEQ ID NO: 238, wherein X₁ is no amino acid; X₂ is no amino acid; X₃ is S; X₄ is T; X₅ is S; X₆ is S; X₇ is S; X₈ is D; X₉ is T; X₁₀ is T; X₁₁ is F; X₁₂ is Q; and X₁₃ is N (VRC01hpL02 E1/I2 deletion/V3S; SEQ ID NO: 232);

[0401] (p) SEQ ID NO: 238, wherein X₁ is no amino acid; X₂ is no amino acid; X₃ is S; X₄ is I; X₅ is S; X₆ is S; X₇ is S; X₈ is D; X₉ is T; X₁₀ is T; X₁₁ is F; X₁₂ is V; and X₁₃ is I (VRC01hpL03 E1/I2 deletion/V3S; SEQ ID NO: 233);

[0402] (q) SEQ ID NO: 238, wherein X₁ is no amino acid; X₂ is no amino acid; X₃ is S; X₄ is Q; X₅ is S; X₆ is S; X₇ is N; X₈ is D; X₉ is T; X₁₀ is T; X₁₁ is F; X₁₂ is V; and X₁₃ is I (VRC01hpL04 E1/I2 deletion/V3S; SEQ ID NO: 234);

[0403] (r) SEQ ID NO: 238, wherein X₁ is no amino acid; X₂ is no amino acid; X₃ is S; X₄ is Q; X₅ is S; X₆ is S; X₇ is N; X₈ is D; X₉ is T; X₁₀ is T; X₁₁ is F; X₁₂ is Q; and X₁₃ is N (VRC01hpL05 E1/I2 deletion/V3S; SEQ ID NO: 235);

[0404] (s) SEQ ID NO: 238, wherein X₁ is no amino acid; X₂ is no amino acid; X₃ is S; X₄ is E; X₅ is K; X₆ is E; X₇ is E; X₈ is E; X₉ is R; X₁₀ is R; X₁₁ is F; X₁₂ is Q; and X₁₃ is N (VRC01hpL06 E1/I2 deletion/V3S; SEQ ID NO: 236);

[0405] (t) SEQ ID NO: 238, wherein X₁ is no amino acid; X₂ is no amino acid; X₃ is E; X₄ is Q; X₅ is S; X₆ is S; X₇ is N; X₈ is D; X₉ is T; X₁₀ is T; X₁₁ is F; X₁₂ is V; and X₁₃ is I (VRC01hpL04 E1/I2 deletion/V3E; SEQ ID NO: 237);

[0406] (u) SEQ ID NO: 238, wherein X₁ is no amino acid; X₂ is no amino acid; X₃ is V; X₄ is I; X₅ is S; X₆ is S; X₇ is W; X₈ is D; X₉ is N; X₁₀ is T; X₁₁ is F; X₁₂ is V; and X₁₃ is I (VRC01 E1/I2 deletion; SEQ ID NO: 53); or

[0407] (v) SEQ ID NO: 238, wherein X₁ is no amino acid; X₂ is no amino acid; X₃ is V; X₄ is T; X₅ is S; X₆ is S; X₇ is S; X₈ is D; X₉ is T; X₁₀ is T; X₁₁ is F; X₁₂ is Q; and X₁₃ is N (VRC01hpL02; SEQ ID NO: 50).

[0408] In some embodiments, the antibody includes a heavy chain variable domain and a light chain variable domain, wherein the antibody specifically binds gp120, and wherein the antibody is neutralizing, wherein the heavy chain variable domain includes the amino acid sequence of SEQ ID NO: 40, wherein X₁ is V, X₂ is H, X₃ is S and X₄ is A (VRC07 I37V, G54H, T93A; SEQ ID NO: 259), and wherein the light chain variable domain includes a light chain variable domain as described herein, or a known VRC01-like light chain variable domain. In several embodiments, the antibody is not self-reactive, and/or has low self-reactivity. In additional embodiments, the antibody is not immunogenic and/or has low immunogenicity. For example, in some embodiments, the antibody includes a heavy chain variable domain and a light chain variable domain, wherein the antibody specifically binds gp120, and wherein the antibody is neutralizing, wherein the heavy chain variable domain of the antibody includes SEQ ID NO: 40, wherein X₁ is V, X₂ is H, X₃ is S and X₄ is A (VRC07 I37V, G54H, T93A; SEQ ID NO: 259), and the light chain of the antibody includes:

[0409] (a) SEQ ID NO: 238, wherein X₁ is E; X₂ is I; X₃ is V; X₄ is I; X₅ is S; X₆ is S; X₇ is W; X₈ is D; X₉ is N; X₁₀ is T; X₁₁ is F; X₁₂ is V; X₁₃ is I (VRC01 light chain; SEQ ID NO: 9);

[0410] (b) SEQ ID NO: 238, wherein X₁ is no amino acid; X₂ is no amino acid; X₃ is E; X₄ is I; X₅ is S; X₆ is S; X₇ is W; X₈ is D; X₉ is N; X₁₀ is T; X₁₁ is F; X₁₂ is V; and X₁₃ is I (VRC01L E1/I2del-V3E; SEQ ID NO: 219);

[0411] (c) SEQ ID NO: 238, wherein X₁ is no amino acid; X₂ is no amino acid; X₃ is K; X₄ is I; X₅ is S; X₆ is S; X₇ is W; X₈ is D; X₉ is N; X₁₀ is T; X₁₁ is F; X₁₂ is V; and X₁₃ is I (VRC01L V3K light chain; SEQ ID NO: 220);

[0412] (d) SEQ ID NO: 238, wherein X₁ is no amino acid; X₂ is no amino acid; X₃ is S; X₄ is I; X₅ is S; X₆ is S; X₇ is W; X₈ is D; X₉ is N; X₁₀ is T; X₁₁ is F; X₁₂ is V; and X₁₃ is I (VRC01L E1/I2del V3S light chain; SEQ ID NO: 221);

[0413] (e) SEQ ID NO: 238, wherein X₁ is no amino acid; X₂ is no amino acid; X₃ is V; X₄ is I; X₅ is S; X₆ is S; X₇ is W; X₈ is D; X₉ is N; X₁₀ is T; X₁₁ is D; X₁₂ is V; and X₁₃ is I (VRC01L E1/I2del F97D; SEQ ID NO: 222);

[0414] (f) SEQ ID NO: 238, wherein X₁ is no amino acid; X₂ is no amino acid; X₃ is V; X₄ is I; X₅ is S; X₆ is S; X₇ is W; X₈ is D; X₉ is N; X₁₀ is T; X₁₁ is K; X₁₂ is V; and X₁₃ is I (VRC01L E1/I2del F97K; SEQ ID NO: 223);

[0415] (g) SEQ ID NO: 238, wherein X₁ is no amino acid; X₂ is no amino acid; X₃ is V; X₄ is I; X₅ is S; X₆ is S; X₇ is W; X₈ is D; X₉ is N; X₁₀ is T; X₁₁ is S; X₁₂ is V; and X₁₃ is I (VRC01L E1/I2del F97S; SEQ ID NO: 224);

[0416] (h) SEQ ID NO: 238, wherein X₁ is no amino acid; X₂ is no amino acid; X₃ is V; X₄ is I; X₅ is S; X₆ is S; X₇ is W; X₈ is D; X₉ is N; X₁₀ is T; X₁₁ is H; X₁₂ is V; and X₁₃ is I (VRC01L E1/I2del F97H; SEQ ID NO: 225);

[0417] (i) SEQ ID NO: 238, wherein X₁ is no amino acid; X₂ is no amino acid; X₃ is E; X₄ is I; X₅ is S; X₆ is S; X₇ is W; X₈ is D; X₉ is N; X₁₀ is T; X₁₁ is S; X₁₂ is V; and X₁₃ is I (VRC01L E1/I2del V3E/F97S; SEQ ID NO: 226);

[0418] (j) SEQ ID NO: 238, wherein X₁ is no amino acid; X₂ is no amino acid; X₃ is E; X₄ is I; X₅ is S; X₆ is S; X₇ is W; X₈ is D; X₉ is N; X₁₀ is T; X₁₁ is H; X₁₂ is V; and X₁₃ is I (VRC01L E1/I2del V3E/F97H; SEQ ID NO: 227);

[0419] (k) SEQ ID NO: 238, wherein X₁ is no amino acid; X₂ is no amino acid; X₃ is V; X₄ is I; X₅ is S; X₆ is S; X₇ is S; X₈ is D; X₉ is T; X₁₀ is T; X₁₁ is F; X₁₂ is V; and X₁₃ is I (VRC01hpL03; SEQ ID NO: 228);

[0420] (l) SEQ ID NO: 238, wherein X₁ is no amino acid; X₂ is no amino acid; X₃ is V; X₄ is Q; X₅ is S; X₆ is S; X₇ is N; X₈ is D; X₉ is T; X₁₀ is T; X₁₁ is F; X₁₂ is V; and X₁₃ is I (VRC01hpL04; SEQ ID NO: 229);

[0421] (m) SEQ ID NO: 238, wherein X₁ is no amino acid; X₂ is no amino acid; X₃ is V; X₄ is Q; X₅ is S; X₆ is S; X₇ is N; X₈ is D; X₉ is T; X₁₀ is T; X₁₁ is F; X₁₂ is Q; and X₁₃ is N (VRC01hpL05; SEQ ID NO: 230);

[0422] (n) SEQ ID NO: 238, wherein X₁ is no amino acid; X₂ is no amino acid; X₃ is V; X₄ is E; X₅ is K; X₆ is E; X₇ is E; X₈ is E; X₉ is R; X₁₀ is R; X₁₁ is F; X₁₂ is Q; and X₁₃ is N (VRC01hpL06; SEQ ID NO: 231);

[0423] (o) SEQ ID NO: 238, wherein X₁ is no amino acid; X₂ is no amino acid; X₃ is S; X₄ is T; X₅ is S; X₆ is S; X₇ is S; X₈ is D; X₉ is T; X₁₀ is T; X₁₁ is F; X₁₂ is Q; and X₁₃ is N (VRC01hpL02 E1/I2 deletion/V3S; SEQ ID NO: 232);

[0424] (p) SEQ ID NO: 238, wherein X₁ is no amino acid; X₂ is no amino acid; X₃ is S; X₄ is I; X₅ is S; X_{6 is S; X}₇ is S; X₈ is D; X₉ is T; X₁₀ is T; X₁₁ is F; X₁₂ is V; and X₁₃ is I (VRC01hpL03 E1/I2 deletion/V3S; SEQ ID NO: 233);

[0425] (q) SEQ ID NO: 238, wherein X₁ is no amino acid; X₂ is no amino acid; X₃ is S; X₄ is Q; X₅ is S; X₆ is S; X₇ is N; X₈ is D; X₉ is T; X₁₀ is T; X₁₁ is F; X₁₂ is V; and X₁₃ is I (VRC01hpL04 E1/I2 deletion/V3S; SEQ ID NO: 234);

[0426] (r) SEQ ID NO: 238, wherein X₁ is no amino acid; X₂ is no amino acid; X₃ is S; X₄ is Q; X₅ is S; X₆ is S; X₇ is N; X₈ is D; X₉ is T; X₁₀ is T; X₁₁ is F; X₁₂ is Q; and X₁₃ is N (VRC01hpL05 E1/I2 deletion/V3S; SEQ ID NO: 235);

[0427] (s) SEQ ID NO: 238, wherein X₁ is no amino acid; X₂ is no amino acid; X₃ is S; X₄ is E; X₅ is K; X₆ is E; X₇ is E; X₈ is E; X₉ is R; X₁₀ is R; X₁₁ is F; X₁₂ is Q; and X₁₃ is N (VRC01hpL06 E1/I2 deletion/V3S; SEQ ID NO: 236);

[0428] (t) SEQ ID NO: 238, wherein X₁ is no amino acid; X₂ is no amino acid; X₃ is E; X₄ is Q; X₅ is S; X₆ is S; X₇ is N; X₈ is D; X₉ is T; X₁₀ is T; X₁₁ is F; X₁₂ is V; and X₁₃ is I (VRC01hpL04 E1/I2 deletion/V3E; SEQ ID NO: 237);

[0429] (u) SEQ ID NO: 238, wherein X₁ is no amino acid; X₂ is no amino acid; X₃ is V; X₄ is I; X₅ is S; X₆ is S; X₇ is W; X₈ is D; X₉ is N; X₁₀ is T; X₁₁ is F; X₁₂ is V; and X₁₃ is I (VRC01 E1/I2 deletion; SEQ ID NO: 53); or

[0430] (v) SEQ ID NO: 238, wherein X₁ is no amino acid; X₂ is no amino acid; X₃ is V; X₄ is T; X₅ is S; X₆ is S; X₇ is S; X₈ is D; X₉ is T; X₁₀ is T; X₁₁ is F; X₁₂ is Q; and X₁₃ is N (VRC01hpL02; SEQ ID NO: 50).

[0431] In some embodiments, the antibody includes a heavy chain variable domain and a light chain variable domain, wherein the antibody specifically binds gp120, and wherein the antibody is neutralizing, wherein the heavy chain variable domain includes the amino acid sequence of SEQ ID NO: 40, wherein X₁ is V, X₂ is H, X₃ is N and X₄ is A (VRC07 I37V, G54H, S58N, T93A; SEQ ID NO: 260), and wherein the light chain variable domain includes a light chain variable domain as described herein, or a known VRC01-like light chain variable domain. In several embodiments, the antibody is not self-reactive, and/or has low self-reactivity. In additional embodiments, the antibody is not immunogenic and/or has low immunogenicity. For example, in some embodiments, the antibody includes a heavy chain variable domain and a light chain variable domain, wherein the antibody specifically binds gp120, and wherein the antibody is neutralizing, wherein the heavy chain variable domain of the antibody includes SEQ ID NO: 40, wherein X₁ is V, X₂ is H, X₃ is N and X₄ is A (VRC07 I37V, G54H, S58N, T93A; SEQ ID NO: 260), and the light chain of the antibody includes:

[0432] (a) SEQ ID NO: 238, wherein X₁ is E; X₂ is I; X₃ is V; X₄ is I; X₅ is S; X₆ is S; X₇ is W; X₈ is D; X₉ is N; X₁₀ is T; X₁₁ is F; X₁₂ is V; X₁₃ is I (VRC01 light chain; SEQ ID NO: 9);

[0433] (b) SEQ ID NO: 238, wherein X₁ is no amino acid; X₂ is no amino acid; X₃ is E; X₄ is I; X₅ is S; X₆ is S; X₇ is W; X₈ is D; X₉ is N; X₁₀ is T; X₁₁ is F; X₁₂ is V; and X₁₃ is I (VRC01L E1/I2del-V3E; SEQ ID NO: 219);

[0434] (c) SEQ ID NO: 238, wherein X₁ is no amino acid; X₂ is no amino acid; X₃ is K; X₄ is I; X₅ is S; X₆ is S; X₇ is W; X₈ is D; X₉ is N; X₁₀ is T; X₁₁ is F; X₁₂ is V; and X₁₃ is I (VRC01L V3K light chain; SEQ ID NO: 220);

[0435] (d) SEQ ID NO: 238, wherein X₁ is no amino acid; X₂ is no amino acid; X₃ is S; X₄ is I; X₅ is S; X₆ is S; X₇ is W; X₈ is D; X₉ is N; X₁₀ is T; X₁₁ is F; X₁₂ is V; and X₁₃ is I (VRC01L E1/I2del V3S light chain; SEQ ID NO: 221);

[0436] (e) SEQ ID NO: 238, wherein X₁ is no amino acid; X₂ is no amino acid; X₃ is V; X₄ is I; X₅ is S; X₆ is S; X₇ is W; X₈ is D; X₉ is N; X₁₀ is T; X₁₁ is D; X₁₂ is V; and X₁₃ is I (VRC01L E1/I2del F97D; SEQ ID NO: 222);

[0437] (f) SEQ ID NO: 238, wherein X₁ is no amino acid; X₂ is no amino acid; X₃ is V; X₄ is I; X₅ is S; X₆ is S; X₇ is W; X₈ is D; X₉ is N; X₁₀ is T; X₁₁ is K; X₁₂ is V; and X₁₃ is I (VRC01L E1/I2del F97K; SEQ ID NO: 223);

[0438] (g) SEQ ID NO: 238, wherein X₁ is no amino acid; X₂ is no amino acid; X₃ is V; X₄ is I; X₅ is S; X₆ is S; X₇ is W; X₈ is D; X₉ is N; X₁₀ is T; X₁₁ is S; X₁₂ is V; and X₁₃ is I (VRC01L E1/I2del F97S; SEQ ID NO: 224);

[0439] (h) SEQ ID NO: 238, wherein X₁ is no amino acid; X₂ is no amino acid; X₃ is V; X₄ is I; X₅ is S; X₆ is S; X₇ is W; X₈ is D; X₉ is N; X₁₀ is T; X₁₁ is H; X₁₂ is V; and X₁₃ is I (VRC01L E1/I2del F97H; SEQ ID NO: 225);

[0440] (i) SEQ ID NO: 238, wherein X₁ is no amino acid; X₂ is no amino acid; X₃ is E; X₄ is I; X₅ is S; X₆ is S; X₇ is W; X₈ is D; X₉ is N; X₁₀ is T; X₁₁ is S; X₁₂ is V; and X₁₃ is I (VRC01L E1/I2del V3E/F97S; SEQ ID NO: 226);

[0441] (j) SEQ ID NO: 238, wherein X₁ is no amino acid; X₂ is no amino acid; X₃ is E; X₄ is I; X₅ is S; X₆ is S; X₇ is W; X₈ is D; X₉ is N; X₁₀ is T; X₁₁ is H; X₁₂ is V; and X₁₃ is I (VRC01L E1/I2del V3E/F97H; SEQ ID NO: 227);

[0442] (k) SEQ ID NO: 238, wherein X₁ is no amino acid; X₂ is no amino acid; X₃ is V; X₄ is I; X₅ is S; X₆ is S; X₇ is S; X₈ is D; X₉ is T; X₁₀ is T; X₁₁ is F; X₁₂ is V; and X₁₃ is I (VRC01hpL03; SEQ ID NO: 228);

[0443] (l) SEQ ID NO: 238, wherein X₁ is no amino acid; X₂ is no amino acid; X₃ is V; X₄ is Q; X₅ is S; X₆ is S; X₇ is N; X₈ is D; X₉ is T; X₁₀ is T; X₁₁ is F; X₁₂ is V; and X₁₃ is I (VRC01hpL04; SEQ ID NO: 229);

[0444] (m) SEQ ID NO: 238, wherein X₁ is no amino acid; X₂ is no amino acid; X₃ is V; X₄ is Q; X₅ is S; X₆ is S; X₇ is N; X₈ is D; X₉ is T; X₁₀ is T; X₁₁ is F; X₁₂ is Q; and X₁₃ is N (VRC01hpL05; SEQ ID NO: 230);

[0445] (n) SEQ ID NO: 238, wherein X₁ is no amino acid; X₂ is no amino acid; X₃ is V; X₄ is E; X₅ is K; X₆ is E; X₇ is E; X₈ is E; X₉ is R; X₁₀ is R; X₁₁ is F; X₁₂ is Q; and X₁₃ is N (VRC01hpL06; SEQ ID NO: 231);

[0446] (o) SEQ ID NO: 238, wherein X₁ is no amino acid; X₂ is no amino acid; X₃ is S; X₄ is T; X₅ is S; X₆ is S; X₇ is S; X₈ is D; X₉ is T; X₁₀ is T; X₁₁ is F; X₁₂ is Q; and X₁₃ is N (VRC01hpL02 E1/I2 deletion/V3S; SEQ ID NO: 232);

[0447] (p) SEQ ID NO: 238, wherein X₁ is no amino acid; X₂ is no amino acid; X₃ is S; X₄ is I; X₅ is S; X_{6 is S; X}₇ is S; X₈ is D; X₉ is T; X₁₀ is T; X₁₁ is F; X₁₂ is V; and X₁₃ is I (VRC01hpL03 E1/I2 deletion/V3S; SEQ ID NO: 233);

[0448] (q) SEQ ID NO: 238, wherein X₁ is no amino acid; X₂ is no amino acid; X₃ is S; X₄ is Q; X₅ is S; X₆ is S; X₇ is N; X₈ is D; X₉ is T; X₁₀ is T; X₁₁ is F; X₁₂ is V; and X₁₃ is I (VRC01hpL04 E1/I2 deletion/V3S; SEQ ID NO: 234);

[0449] (r) SEQ ID NO: 238, wherein X₁ is no amino acid; X₂ is no amino acid; X₃ is S; X₄ is Q; X₅ is S; X₆ is S; X₇ is N; X₈ is D; X₉ is T; X₁₀ is T; X₁₁ is F; X₁₂ is Q; and X₁₃ is N (VRC01hpL05 E1/I2 deletion/V3S; SEQ ID NO: 235);

[0450] (s) SEQ ID NO: 238, wherein X₁ is no amino acid; X₂ is no amino acid; X₃ is S; X₄ is E; X₅ is K; X₆ is E; X₇ is E; X₈ is E; X₉ is R; X₁₀ is R; X₁₁ is F; X₁₂ is Q; and X₁₃ is N (VRC01hpL06 E1/I2 deletion/V3S; SEQ ID NO: 236);

[0451] (t) SEQ ID NO: 238, wherein X₁ is no amino acid; X₂ is no amino acid; X₃ is E; X₄ is Q; X₅ is S; X₆ is S; X₇ is N; X₈ is D; X₉ is T; X₁₀ is T; X₁₁ is F; X₁₂ is V; and X₁₃ is I (VRC01hpL04 E1/I2 deletion/V3E; SEQ ID NO: 237);

[0452] (u) SEQ ID NO: 238, wherein X₁ is no amino acid; X₂ is no amino acid; X₃ is V; X₄ is I; X₅ is S; X₆ is S; X₇ is W; X₈ is D; X₉ is N; X₁₀ is T; X₁₁ is F; X₁₂ is V; and X₁₃ is I (VRC01 E1/I2 deletion; SEQ ID NO: 53); or

[0453] (v) SEQ ID NO: 238, wherein X₁ is no amino acid; X₂ is no amino acid; X₃ is V; X₄ is T; X₅ is S; X₆ is S; X₇ is S; X₈ is D; X₉ is T; X₁₀ is T; X₁₁ is F; X₁₂ is Q; and X₁₃ is N (VRC01hpL02; SEQ ID NO: 50).

[0454] In some embodiments, the antibody includes a heavy chain variable domain and a light chain variable domain, wherein the antibody specifically binds gp120, and wherein the antibody is neutralizing, wherein the heavy chain variable domain includes the amino acid sequence of SEQ ID NO: 196 (NIH4546 heavy chain variable domain), further including a glycine to histidine substitution at Kabat position 54 (a G54H substitution), and wherein the light chain variable domain includes a light chain variable domain as described herein, or a known VRC01-like light chain variable domain. In several embodiments, the antibody is not self-reactive, and/or has low self-reactivity. In additional embodiments, the antibody is not immunogenic and/or has low immunogenicity. For example, in some embodiments, the antibody includes a heavy chain variable domain and a light chain variable domain, wherein the antibody specifically binds gp120, and wherein the antibody is neutralizing, wherein the heavy chain variable domain of the antibody includes SEQ ID NO: 196 (NIH4546 heavy chain variable domain), further including a glycine to histidine substitution at Kabat position 54 (a G54H substitution), and the light chain of the antibody includes:

[0455] (a) SEQ ID NO: 238, wherein X₁ is E; X₂ is I; X₃ is V; X₄ is I; X₅ is S; X₆ is S; X₇ is W; X₈ is D; X₉ is N; X₁₀ is T; X₁₁ is F; X₁₂ is V; X₁₃ is I (VRC01 light chain; SEQ ID NO: 9);

[0456] (b) SEQ ID NO: 238, wherein X₁ is no amino acid; X₂ is no amino acid; X₃ is E; X₄ is I; X₅ is S; X₆ is S; X₇ is W; X₈ is D; X₉ is N; X₁₀ is T; X₁₁ is F; X₁₂ is V; and X₁₃ is I (VRC01L E1/I2del-V3E; SEQ ID NO: 219);

[0457] (c) SEQ ID NO: 238, wherein X₁ is no amino acid; X₂ is no amino acid; X₃ is K; X₄ is I; X₅ is S; X₆ is S; X₇ is W; X₈ is D; X₉ is N; X₁₀ is T; X₁₁ is F; X₁₂ is V; and X₁₃ is I (VRC01L V3K light chain; SEQ ID NO: 220);

[0458] (d) SEQ ID NO: 238, wherein X₁ is no amino acid; X₂ is no amino acid; X₃ is S; X₄ is I; X₅ is S; X₆ is S; X₇ is W; X₈ is D; X₉ is N; X₁₀ is T; X₁₁ is F; X₁₂ is V; and X₁₃ is I (VRC01L E1/I2del V3S light chain; SEQ ID NO: 221);

[0459] (e) SEQ ID NO: 238, wherein X₁ is no amino acid; X₂ is no amino acid; X₃ is V; X₄ is I; X₅ is S; X₆ is S; X₇ is W; X₈ is D; X₉ is N; X₁₀ is T; X₁₁ is D; X₁₂ is V; and X₁₃ is I (VRC01L E1/I2del F97D; SEQ ID NO: 222);

[0460] (f) SEQ ID NO: 238, wherein X₁ is no amino acid; X₂ is no amino acid; X₃ is V; X₄ is I; X₅ is S; X₆ is S; X₇ is W; X₈ is D; X₉ is N; X₁₀ is T; X₁₁ is K; X₁₂ is V; and X₁₃ is I (VRC01L E1/I2del F97K; SEQ ID NO: 223);

[0461] (g) SEQ ID NO: 238, wherein X₁ is no amino acid; X₂ is no amino acid; X₃ is V; X₄ is I; X₅ is S; X₆ is S; X₇ is W; X₈ is D; X₉ is N; X₁₀ is T; X₁₁ is S; X₁₂ is V; and X₁₃ is I (VRC01L E1/I2del F97S; SEQ ID NO: 224);

[0462] (h) SEQ ID NO: 238, wherein X₁ is no amino acid; X₂ is no amino acid; X₃ is V; X₄ is I; X₅ is S; X₆ is S; X₇ is W; X₈ is D; X₉ is N; X₁₀ is T; X₁₁ is H; X₁₂ is V; and X₁₃ is I (VRC01L E1/I2del F97H; SEQ ID NO: 225);

[0463] (i) SEQ ID NO: 238, wherein X₁ is no amino acid; X₂ is no amino acid; X₃ is E; X₄ is I; X₅ is S; X₆ is S; X₇ is W; X₈ is D; X₉ is N; X₁₀ is T; X₁₁ is S; X₁₂ is V; and X₁₃ is I (VRC01L E1/I2del V3E/F97S; SEQ ID NO: 226);

[0464] (j) SEQ ID NO: 238, wherein X₁ is no amino acid; X₂ is no amino acid; X₃ is E; X₄ is I; X₅ is S; X₆ is S; X₇ is W; X₈ is D; X₉ is N; X₁₀ is T; X₁₁ is H; X₁₂ is V; and X₁₃ is I (VRC01L E1/I2del V3E/F97H; SEQ ID NO: 227);

[0465] (k) SEQ ID NO: 238, wherein X₁ is no amino acid; X₂ is no amino acid; X₃ is V; X₄ is I; X₅ is S; X₆ is S; X₇ is S; X₈ is D; X₉ is T; X₁₀ is T; X₁₁ is F; X₁₂ is V; and X₁₃ is I (VRC01hpL03; SEQ ID NO: 228);

[0466] (l) SEQ ID NO: 238, wherein X₁ is no amino acid; X₂ is no amino acid; X₃ is V; X₄ is Q; X₅ is S; X₆ is S; X₇ is N; X₈ is D; X₉ is T; X₁₀ is T; X₁₁ is F; X₁₂ is V; and X₁₃ is I (VRC01hpL04; SEQ ID NO: 229);

[0467] (m) SEQ ID NO: 238, wherein X₁ is no amino acid; X₂ is no amino acid; X₃ is V; X₄ is Q; X₅ is S; X₆ is S; X₇ is N; X₈ is D; X₉ is T; X₁₀ is T; X₁₁ is F; X₁₂ is Q; and X₁₃ is N (VRC01hpL05; SEQ ID NO: 230);

[0468] (n) SEQ ID NO: 238, wherein X₁ is no amino acid; X₂ is no amino acid; X₃ is V; X₄ is E; X₅ is K; X₆ is E; X₇ is E; X₈ is E; X₉ is R; X₁₀ is R; X₁₁ is F; X₁₂ is Q; and X₁₃ is N (VRC01hpL06; SEQ ID NO: 231);

[0469] (o) SEQ ID NO: 238, wherein X₁ is no amino acid; X₂ is no amino acid; X₃ is S; X₄ is T; X₅ is S; X₆ is S; X₇ is S; X₈ is D; X₉ is T; X₁₀ is T; X₁₁ is F; X₁₂ is Q; and X₁₃ is N (VRC01hpL02 E1/I2 deletion/V3S; SEQ ID NO: 232);

[0470] (p) SEQ ID NO: 238, wherein X₁ is no amino acid; X₂ is no amino acid; X₃ is S; X₄ is I; X₅ is S; X_{6 is S; X}₇ is S; X₈ is D; X₉ is T; X₁₀ is T; X₁₁ is F; X₁₂ is V; and X₁₃ is I (VRC01hpL03 E1/I2 deletion/V3S; SEQ ID NO: 233);

[0471] (q) SEQ ID NO: 238, wherein X₁ is no amino acid; X₂ is no amino acid; X₃ is S; X₄ is Q; X₅ is S; X₆ is S; X₇ is N; X₈ is D; X₉ is T; X₁₀ is T; X₁₁ is F; X₁₂ is V; and X₁₃ is I (VRC01hpL04 E1/I2 deletion/V3S; SEQ ID NO: 234);

[0472] (r) SEQ ID NO: 238, wherein X₁ is no amino acid; X₂ is no amino acid; X₃ is S; X₄ is Q; X₅ is S; X₆ is S; X₇ is N; X₈ is D; X₉ is T; X₁₀ is T; X₁₁ is F; X₁₂ is Q; and X₁₃ is N (VRC01hpL05 E1/I2 deletion/V3S; SEQ ID NO: 235);

[0473] (s) SEQ ID NO: 238, wherein X₁ is no amino acid; X₂ is no amino acid; X₃ is S; X₄ is E; X₅ is K; X₆ is E; X₇ is E; X₈ is E; X₉ is R; X₁₀ is R; X₁₁ is F; X₁₂ is Q; and X₁₃ is N (VRC01hpL06 E1/I2 deletion/V3S; SEQ ID NO: 236);

[0474] (t) SEQ ID NO: 238, wherein X₁ is no amino acid; X₂ is no amino acid; X₃ is E; X₄ is Q; X₅ is S; X₆ is S; X₇ is N; X₈ is D; X₉ is T; X₁₀ is T; X₁₁ is F; X₁₂ is V; and X₁₃ is I (VRC01hpL04 E1/I2 deletion/V3E; SEQ ID NO: 237);

[0475] (u) SEQ ID NO: 238, wherein X₁ is no amino acid; X₂ is no amino acid; X₃ is V; X₄ is I; X₅ is S; X₆ is S; X₇ is W; X₈ is D; X₉ is N; X₁₀ is T; X₁₁ is F; X₁₂ is V; and X₁₃ is I (VRC01 E1/I2 deletion; SEQ ID NO: 53); or

[0476] (v) SEQ ID NO: 238, wherein X₁ is no amino acid; X₂ is no amino acid; X₃ is V; X₄ is T; X₅ is S; X₆ is S; X₇ is S; X₈ is D; X₉ is T; X₁₀ is T; X₁₁ is F; X₁₂ is Q; and X₁₃ is N (VRC01hpL02; SEQ ID NO: 50).

[0477] 2. Additional Exemplary Antibodies

[0478] In some embodiments, the isolated monoclonal antibody specifically binds gp120, and includes a heavy chain variable domain including amino acids 26-33 (CDR1), 51-58 (CDR2) and/or 97-114 (CDR3) of SEQ ID NO: 1, wherein the antibody specifically binds gp120 of HIV-1, and wherein the antibody is neutralizing. In some embodiments, the isolated monoclonal antibody specifically binds gp120, and includes a heavy chain variable domain including amino acids 26-33 (CDR1), 51-58 (CDR2) and/or 97-114 (CDR3) of SEQ ID NO: 29, wherein the antibody specifically binds gp120 of HIV-1, and wherein the antibody is neutralizing. In additional embodiments, the heavy chain variable domain of the monoclonal antibody includes amino acids 26-33 (CDR1), 51-58 (CDR2) and/or 97-114 (CDR3) of SEQ ID NO: 2, wherein the antibody specifically binds gp120 and wherein the antibody is neutralizing. In other embodiments, the heavy chain variable domain of the monoclonal antibody includes amino acids 26-33 (CDR1), 51-58 (CDR2) and/or 97-114 (CDR3) of SEQ ID NO: 3 and wherein the antibody specifically binds gp120 and wherein the antibody is neutralizing. In further embodiments, the heavy chain variable domain of the monoclonal antibody includes amino acids 26-33 (CDR1), 51-58 (CDR2) and/or 97-114 (CDR3) of SEQ ID NO: 4 and wherein the antibody specifically binds gp120 wherein the antibody is neutralizing

[0479] In some embodiments, the isolated monoclonal antibody includes a heavy chain variable domain including amino acids 26-33 (CDR1), 51-58 (CDR2) and 97-114 (CDR3) of SEQ ID NO: 1, wherein the antibody specifically binds gp120 of HIV-1, and wherein the antibody is neutralizing. In some embodiments, the isolated monoclonal antibody specifically binds gp120, and includes a heavy chain variable domain including amino acids 26-33 (CDR1), 51-58 (CDR2) and/or 97-114 (CDR3) of SEQ ID NO: 29, wherein the antibody specifically binds gp120 of HIV-1, and wherein the antibody is neutralizing. In additional embodiments, the heavy chain variable domain of the monoclonal antibody includes amino acids 26-33 (CDR1), 51-58 (CDR2) and 97-114 (CDR3) of SEQ ID NO: 2, wherein the antibody specifically binds gp120 and wherein the antibody is neutralizing. In other embodiments, the heavy chain variable domain of the monoclonal antibody includes amino acids 26-33 (CDR1), 51-58 (CDR2) and 97-114 (CDR3) of SEQ ID NO: 3 and wherein the antibody specifically binds gp120 and wherein the antibody is neutralizing. In further embodiments, the heavy chain variable domain of the monoclonal antibody includes amino acids 26-33 (CDR1), 51-58 (CDR2) and 97-114 (CDR3) of SEQ ID NO: 4 and wherein the antibody specifically binds gp120 wherein the antibody is neutralizing

[0480] In further embodiments, the isolated monoclonal antibody includes a heavy chain variable domain including amino acids 26-33 (CDR1), 51-58 (CDR2) and/or 97-114 (CDR3) of SEQ ID NO: 30, wherein the antibody specifically binds gp120 of HIV-1, and wherein the antibody is neutralizing. In specific non-limiting examples, the isolated monoclonal antibody includes a heavy chain variable domain including amino acids 26-33 (CDR1), 51-58 (CDR2) and 97-114 (CDR3) of one of SEQ ID NOs: 31-36, wherein the antibody specifically binds gp120 of HIV-1, and wherein the antibody is neutralizing. In several embodiments, the antibody is not self-reactive, and/or has low self-reactivity. In additional embodiments, the antibody is not immunogenic and/or has low immunogenicity.

[0481] In yet other embodiments, the isolated monoclonal antibody includes a heavy chain variable domain including amino acids 26-33 (CDR1), 51-58 (CDR2) and 97-114 (CDR3) of SEQ ID NO: 30, wherein the antibody specifically binds gp120 of HIV-1, and wherein the antibody is neutralizing. In specific non-limiting examples, the isolated monoclonal antibody includes a heavy chain variable domain including amino acids 26-33 (CDR1), 51-58 (CDR2) and 97-114 (CDR3) of one of SEQ ID NOs: 31-36, wherein the antibody specifically binds gp120 of HIV-1, and wherein the antibody is neutralizing

[0482] In additional embodiments, the isolated monoclonal antibody includes a heavy chain variable domain including amino acids 26-33 (CDR1), 51-58 (CDR2) and/or 97-114 (CDR3) of SEQ ID NO: 38, wherein the antibody specifically binds gp120 of HIV-1, and wherein the antibody is neutralizing. In specific non-limiting examples, the monoclonal antibody includes a heavy chain variable domain including amino acids 26-33 (CDR1), 51-58 (CDR2) and/or 97-114 (CDR3) of SEQ ID NO: 38, wherein X₁₅ is Q; X₁₆ is V or I and X₁₇ is A or T. In other specific non-limiting examples, the monoclonal antibody includes a heavy chain variable domain including amino acids 26-33 (CDR1), 51-58 (CDR2) and/or 97-114 (CDR3) of SEQ ID NO: 38, wherein X₁₅ is Q or R; X₁₆ is V and X₁₇ is A or T. In more specific non-limiting examples, the monoclonal antibody includes a heavy chain variable domain including amino acids 26-33 (CDR1), 51-58 (CDR2) and/or 97-114 (CDR3) of SEQ ID NO: 38, wherein X₁₅ is Q or R; X₁₆ is V or I and X₁₇ is A. In further specific non-limiting examples, the monoclonal antibody includes a heavy chain variable domain including amino acids 26-33 (CDR1), 51-58 (CDR2) and/or 97-114 (CDR3) of SEQ ID NO: 38, wherein X₁₅ is Q; X₁₆ is V and X₁₇ is A or T. In yet other specific non limiting examples, the monoclonal antibody includes a heavy chain variable domain including amino acids 26-33 (CDR1), 51-58 (CDR2) and/or 97-114 (CDR3) of SEQ ID NO: 38, wherein X₁₅ is Q or R; X₁₆ is V and X₁₇ is A. In different specific non-limiting examples, the monoclonal antibody includes a heavy chain variable domain including amino acids 26-33 (CDR1), 51-58 (CDR2) and/or 97-114 (CDR3) of SEQ ID NO: 38, wherein X₁₅ is Q; X₁₆ is V or I and X₁₇ is A. In additional embodiments, the isolated monoclonal antibody includes a heavy chain variable domain including amino acids 26-33 (CDR1), 51-58 (CDR2) and/or 97-114 (CDR3) of SEQ ID NO: 39, wherein the antibody specifically binds gp120 of HIV-1.

[0483] In additional embodiments, the isolated monoclonal antibody includes a heavy chain variable domain including amino acids 26-33 (CDR1), 51-58 (CDR2) and 97-114 (CDR3) of SEQ ID NO: 38, wherein the antibody specifically binds gp120 of HIV-1, and wherein the antibody is neutralizing. In other specific non-limiting examples, the monoclonal antibody includes a heavy chain variable domain including amino acids 26-33 (CDR1), 51-58 (CDR2) and/or 97-114 (CDR3) of SEQ ID NO: 38, wherein X₁₅ is Q or R; X₁₆ is V and X₁₇ is A or T. In more specific non-limiting examples, the monoclonal antibody includes a heavy chain variable domain including amino acids 26-33 (CDR1), 51-58 (CDR2) and 97-114 (CDR3) of SEQ ID NO: 38, wherein X₁₅ is Q or R; X₁₆ is V or I and X₁₇ is A. In further specific non-limiting examples, the monoclonal antibody includes a heavy chain variable domain including amino acids 26-33 (CDR1), 51-58 (CDR2) and 97-114 (CDR3) of SEQ ID NO: 38, wherein X₁₅ is Q; X₁₆ is V and X₁₇ is A or T. In yet other specific non limiting examples, the monoclonal antibody includes a heavy chain variable domain including amino acids 26-33 (CDR1), 51-58 (CDR2) and 97-114 (CDR3) of SEQ ID NO: 38, wherein X₁₅ is Q or R; X₁₆ is V and X₁₇ is A. In different specific non-limiting examples, the monoclonal antibody includes a heavy chain variable domain including amino acids 26-33 (CDR1), 51-58 (CDR2) and 97-114 (CDR3) of SEQ ID NO: 38, wherein X₁₅ is Q; X₁₆ is V or I and X₁₇ is A. In additional embodiments, the isolated monoclonal antibody includes a heavy chain variable domain including amino acids 26-33 (CDR1), 51-58 (CDR2) and 97-114 (CDR3) of SEQ ID NO: 39, wherein the antibody specifically binds gp120 of HIV-1.

[0484] In some embodiments, the monoclonal antibody includes a heavy chain variable domain including SEQ ID NO: 1 or SEQ ID NO: 29. Specific, non-limiting examples are antibodies that include a heavy chain variable domain that includes an amino acid sequence set forth as SEQ ID NO: 2, SEQ ID NO: 3 or SEQ ID NO: 4.

[0485] In some embodiments, the isolated monoclonal antibody specifically binds gp120, and includes a heavy chain variable domain including amino acids 26-33 (CDR1), 51-58 (CDR2) and/or 97-114 (CDR3) of SEQ ID NO: 23, wherein the antibody specifically binds gp120 of HIV-1, and wherein the antibody is neutralizing. In additional embodiments, the heavy chain variable domain of the monoclonal antibody includes amino acids 26-33 (CDR1), 51-58 (CDR2) and/or 97-114 (CDR3) of SEQ ID NO: 24, wherein the antibody specifically binds gp120 and wherein the antibody is neutralizing. In another embodiment, the heavy chain variable domain of the monoclonal antibody includes amino acids 26-33 (CDR1), 51-58 (CDR2) and/or 97-114 (CDR3) of SEQ ID NO: 25 and wherein the antibody specifically binds gp120 and wherein the antibody is neutralizing. In further embodiments, the heavy chain variable domain of the monoclonal antibody includes amino acids 26-33 (CDR1), 51-58 (CDR2) and/or 97-114 (CDR3) of SEQ ID NO: 26 and wherein the antibody specifically binds gp120 wherein the antibody is neutralizing

[0486] In some embodiments, the isolated monoclonal antibody includes a heavy chain variable domain including amino acids 26-33 (CDR1), 51-58 (CDR2) and 97-114 (CDR3) of SEQ ID NO: 23, wherein the antibody specifically binds gp120 of HIV-1, and wherein the antibody is neutralizing. In additional embodiments, the heavy chain variable domain of the monoclonal antibody includes amino acids 26-33 (CDR1), 51-58 (CDR2) and 97-114 (CDR3) of SEQ ID NO: 24, wherein the antibody specifically binds gp120 and wherein the antibody is neutralizing. In another embodiment, the heavy chain variable domain of the monoclonal antibody includes amino acids 26-33 (CDR1), 51-58 (CDR2) and 97-114 (CDR3) of SEQ ID NO: 25 and wherein the antibody specifically binds gp120 and wherein the antibody is neutralizing. In further embodiments, the heavy chain variable domain of the monoclonal antibody includes amino acids 26-33 (CDR1), 51-58 (CDR2) and 97-114 (CDR3) of SEQ ID NO: 26 and wherein the antibody specifically binds gp120 wherein the antibody is neutralizing

[0487] In some embodiments, the monoclonal antibody includes a heavy chain variable domain including SEQ ID NO: 23. Specific, non-limiting examples are antibodies that include a heavy chain variable domain that includes an amino acid sequence set forth as SEQ ID NO: 24, SEQ ID NO: 25, or SEQ ID NO: 26.

[0488] In additional embodiments, the monoclonal antibody includes a heavy chain variable domain including the amino acid sequence set forth as SEQ ID NO: 30. Specific, non-limiting examples are antibodies that include a heavy chain variable domain that includes an amino acid sequence set forth as SEQ ID NO: 31, SEQ ID NO: 32, SEQ ID NO: 33, SEQ ID NO: 34, SEQ ID NO: 35 or SEQ ID NO: 36.

[0489] In more embodiments, the isolated monoclonal antibody includes a heavy chain variable domain including the amino acid sequence set forth as SEQ ID NO: 38. In specific non-limiting examples, the monoclonal antibody includes a heavy chain variable domain including the amino acid sequence set forth as SEQ ID NO: 38, wherein X₁₅ is Q; X₁₆ is V or I and X₁₇ is A or T. In other specific non-limiting examples, the monoclonal antibody includes a heavy chain variable domain including the amino acid sequence set forth as SEQ ID NO: 38, wherein X₁₅ is Q or R; X₁₆ is V and X₁₇ is A or T. In more specific non-limiting examples, the monoclonal antibody includes a heavy chain variable domain including the amino acid sequence set forth as SEQ ID NO: 38, wherein X₁₅ is Q or R; X₁₆ is V or I and X₁₇ is A. In further specific non-limiting examples, the monoclonal antibody includes a heavy chain variable domain the amino acid sequence set forth as SEQ ID NO: 38, wherein X₁₅ is Q; X₁₆ is V and X₁₇ is A or T. In yet other specific non limiting examples, the monoclonal antibody includes a heavy chain variable domain including the amino acid sequence set forth as SEQ ID NO: 38, wherein X₁₅ is Q or R; X₁₆ is V and X₁₇ is A. In different specific non-limiting examples, the monoclonal antibody includes a heavy chain variable domain including the amino acid sequence set forth as SEQ ID NO: 38, wherein X₁₅ is Q; X₁₆ is V or I and X₁₇ is A. In additional embodiments, the isolated monoclonal antibody includes a heavy chain variable domain the amino acid sequence set forth as SEQ ID NO: 39.

[0490] In additional embodiments, the light chain of the isolated human monoclonal antibody includes amino acids 27-30 (CDR1), 48-50 (CDR2) and/or 87-91 (CDR3) of SEQ ID NO: 6 wherein the antibody specifically binds gp120 and wherein the antibody is neutralizing. In further embodiments, the light chain of the isolated human monoclonal antibody includes amino acids 27-30 (CDR1), 48-50 (CDR2) and/or 87-91 (CDR3) of SEQ ID NO: 7, wherein the antibody specifically binds gp120 and wherein the antibody is neutralizing. In some embodiments, the light chain of the isolated human monoclonal antibody includes amino acids 27-30 (CDR1), 48-50 (CDR2) and/or 87-91 (CDR3) of SEQ ID NO: 8, wherein the antibody specifically binds gp120 and wherein the antibody is neutralizing. In other embodiments, the light chain of the isolated human monoclonal antibody includes amino acids 27-30 (CDR1), 48-50 (CDR2) and/or 87-91 (CDR3) of SEQ ID NO: 9, wherein the antibody specifically binds gp120 and wherein the antibody is neutralizing. In further embodiments, the light chain of the isolated human monoclonal antibody includes amino acids 27-30 (CDR1), 48-50 (CDR2) and/or 87-91 (CDR3) of SEQ ID NO: 27, wherein the antibody specifically binds gp120 and wherein the antibody is neutralizing

[0491] In further embodiments, the light chain of the isolated human monoclonal antibody includes amino acids 27-30 (CDR1), 48-50 (CDR2) and 87-91 (CDR3) of SEQ ID NO: 6 wherein the antibody specifically binds gp120 and wherein the antibody is neutralizing. In further embodiments, the light chain of the isolated human monoclonal antibody includes amino acids 27-30 (CDR1), 48-50 (CDR2) and 87-91 (CDR3) of SEQ ID NO: 7 wherein the antibody specifically binds gp120 and wherein the antibody is neutralizing. In some embodiments, the light chain of the isolated human monoclonal antibody includes amino acids 27-30 (CDR1), 48-50 (CDR2) and 87-91 (CDR3) of SEQ ID NO: 8 wherein the antibody specifically binds gp120 and wherein the antibody is neutralizing. In other embodiments, the light chain of the isolated human monoclonal antibody includes amino acids 27-30 (CDR1), 48-50 (CDR2) and 87-91 (CDR3) of SEQ ID NO: 9 wherein the antibody specifically binds gp120 and wherein the antibody is neutralizing. In further embodiments, the light chain of the isolated human monoclonal antibody includes amino acids 27-30 (CDR1), 48-50 (CDR2) and 87-91 (CDR3) of SEQ ID NO: 27, wherein the antibody specifically binds gp120 and wherein the antibody is neutralizing

[0492] In some embodiments, the monoclonal antibody includes a light chain variable domain including SEQ ID NO: 6. Specific, non-limiting examples are antibodies that include a light chain variable domain that includes an amino acid sequence set forth as SEQ ID NO: 7 or SEQ ID NO: 8. In other embodiments, the monoclonal antibody includes a light chain variable domain including SEQ ID NO: 9. In still other embodiments, the monoclonal antibody includes a light chain variable domain including as SEQ ID NO: 27.

[0493] In some embodiments the light chain variable domain of the antibody includes amino acids 27-30 (CDR1), 48-50 (CDR2) and 87-91 (CDR3) of SEQ ID NO: 41. In additional embodiments, the light chain variable domain of the antibody includes SEQ ID NO: 41, wherein X₁ is E, X₂ is I, X₃ is I, X₄ is W, X₅ is N, X₆ is V, and X₇ is I [VRC01]. In more embodiments, the light chain variable domain includes SEQ ID NO: 41, wherein X₁ is no amino acid, X₂ is no amino acid, X₃ is I, X₄ is W, X₅ is N, X₆ is V, and X₇ is I [VRC01 E1/I2 deletion]. In yet other embodiments, the light chain variable domain includes SEQ ID NO: 41, wherein X₁ is no amino acid, X₂ is no amino acid, X₃ is I, X₄ is W, X₅ is T, X₆ is V, and X₇ is I [VRC01 E1/I2 deletion N72T]. In some embodiments, the light chain variable domain includes SEQ ID NO: 41, wherein X₁ is E, X₂ is I, X₃ is T, X₄ is 5, X₅ is T, X₆ is Q, and X₇ is N. In additional embodiments, the light chain variable domain includes SEQ ID NO: 41, wherein X₁ is no amino acid, X₂ is no amino acid, X₃ is T, X₄ is 5, X₅ is T, X₆ is Q, and X₇ is N. In all of these embodiments, the antibody specifically binds gp120, and wherein the antibody is neutralizing

[0494] In some embodiments, the isolated monoclonal antibody includes a heavy chain variable domain including amino acids 26-33 (CDR1), 51-58 (CDR2) and/or 97-114 (CDR3) of SEQ ID NO: 40, and a light chain variable domain including amino acids 27-30 (CDR1), 48-50 (CDR2) and/or 87-91 (CDR3) of SEQ ID NO: 41, wherein the antibody specifically binds gp120 of HIV-1, and wherein the antibody is neutralizing. In additional embodiments, the isolated monoclonal antibody includes a heavy chain variable domain including amino acids 26-33 (CDR1), 51-58 (CDR2) and/or 97-114 (CDR3) of SEQ ID NO: 40, wherein X₁ is I, X₂ is H, X₃ is S and X₄ is T, and a light chain variable domain including amino acids 27-30 (CDR1), 48-50 (CDR2) and/or 87-91 (CDR3) of SEQ ID NO: 41, wherein the antibody specifically binds gp120 of HIV-1, and wherein the antibody is neutralizing. In other embodiments, the isolated monoclonal antibody includes a heavy chain variable domain including amino acids 26-33 (CDR1), 51-58 (CDR2) and/or 97-114 (CDR3) of SEQ ID NO: 40, wherein X₁ is I, X₂ is H, X₃ is N and X₄ is T, and a light chain variable domain including amino acids 27-30 (CDR1), 48-50 (CDR2) and/or 87-91 (CDR3) of SEQ ID NO: 41, wherein the antibody specifically binds gp120 of HIV-1, and wherein the antibody is neutralizing

[0495] In yet other embodiments, the isolated monoclonal antibody includes a heavy chain variable domain including SEQ ID NO: 40, and a light chain variable domain including SEQ ID NO: 41. In some embodiments, the heavy chain variable domain of the antibody includes one of: (a) SEQ ID NO: 40, wherein X₁ is I, X₂ is H, X₃ is S and X₄ is T; (b) SEQ ID NO: 40, wherein X₁ is I, X₂ is H, X₃ is N and X₄ is T; (c) SEQ ID NO: 40, wherein X₁ is V, X₂ is H, X₃ is S and X₄ is A; or (d) SEQ ID NO: 40, wherein X₁ is V, X₂ is H, X₃ is N and X₄ is A and the light chain variable domain includes SEQ ID NO: 41. In further embodiments, the heavy chain variable domain of the antibody includes one of: (a) SEQ ID NO: 40, wherein X₁ is I, X₂ is H, X₃ is S and X₄ is T; (b) SEQ ID NO: 40, wherein X₁ is I, X₂ is H, X₃ is N and X₄ is T; (c) SEQ ID NO: 40, wherein X₁ is V, X₂ is H, X₃ is S and X₄ is A; or (d) SEQ ID NO: 40, wherein X₁ is V, X₂ is H, X₃ is N and X₄ is V; and the light chain variable domain includes one of (e) SEQ ID NO: 41, wherein X₁ is E, X₂ is I, X₃ is I, X₄ is W, X₅ is N, X₆ is V, and X₇ is I [VRC01]; (f) SEQ ID NO: 41, wherein X₁ is no amino acid, X₂ is no amino acid, X₃ is I, X₄ is W, X₅ is N, X₆ is V, and X₇ is I [VRC01 E1/I2 deletion]; (g) SEQ ID NO: 41, wherein X₁ is no amino acid, X₂ is no amino acid, X₃ is I, X₄ is W, X₅ is T, X₆ is V, and X₇ is I [VRC01 E1/I2 deletion N72T]; (h) SEQ ID NO: 41, wherein X₁ is E, X₂ is I, X₃ is T, X₄ is 5, X₅ is T, X₆ is Q, and X₇ is N; or (i) SEQ ID NO: 41, wherein X₁ is E, X₂ is no amino acid, X₃ is T, X₄ is 5, X₅ is T, X₆ is Q, and X₇ is N.

[0496] In some embodiments, the isolated monoclonal antibody includes a heavy chain variable domain including amino acids 26-33 (CDR1), 51-58 (CDR2) and/or 97-114 (CDR3) of SEQ ID NO: 1, and includes a light chain variable domain including amino acids 27-30 (CDR1), 48-50 (CDR2) and/or 87-91 (CDR3) of SEQ ID NO: 6, wherein the antibody specifically binds gp120 of HIV-1, and wherein the antibody is neutralizing. In further embodiments, the isolated monoclonal antibody includes a heavy chain variable domain including amino acids 26-33 (CDR1), 51-58 (CDR2) and/or 97-114 (CDR3) of SEQ ID NO: 2, and includes a light chain variable domain including amino acids 27-30 (CDR1), 48-50 (CDR2) and/or 87-91 (CDR3) of SEQ ID NO: 9, wherein the antibody specifically binds gp120 of HIV-1, and wherein the antibody is neutralizing. In additional embodiments, the heavy chain variable domain of the monoclonal antibody includes amino acids 26-33 (CDR1), 51-58 (CDR2) and/or 97-114 (CDR3) of SEQ ID NO: 3, and the light chain variable domain and includes a light chain variable domain including amino acids 27-30 (CDR1), 48-50 (CDR2) and/or 87-91 (CDR3) of SEQ ID NO: 7, wherein the antibody specifically binds gp120 and wherein the antibody is neutralizing. In yet other embodiments, the isolated monoclonal antibody includes a heavy chain variable domain including amino acids 26-33 (CDR1), 51-58 (CDR2) and/or 97-114 (CDR3) of SEQ ID NO: 4, and includes a light chain variable domain including amino acids 27-30 (CDR1), 48-50 (CDR2) and/or 87-91 (CDR3) of SEQ ID NO: 8, wherein the antibody specifically binds gp120 of HIV-1, and wherein the antibody is neutralizing

[0497] In additional embodiments, the isolated monoclonal antibody includes a heavy chain variable domain including amino acids 26-33 (CDR1), 51-58 (CDR2) and 97-114 (CDR3) of SEQ ID NO: 1, and includes a light chain variable domain including amino acids 27-30 (CDR1), 48-50 (CDR2) and 87-91 (CDR3) of SEQ ID NO: 6, wherein the antibody specifically binds gp120 of HIV-1, and wherein the antibody is neutralizing. In further embodiments, the isolated monoclonal antibody includes a heavy chain variable domain including amino acids 26-33 (CDR1), 51-58 (CDR2) and 97-114 (CDR3) of SEQ ID NO: 2, and includes a light chain variable domain including amino acids 27-30 (CDR1), 48-50 (CDR2) and 87-91 (CDR3) of SEQ ID NO: 9, wherein the antibody specifically binds gp120 of HIV-1, and wherein the antibody is neutralizing. In additional embodiments, the heavy chain variable domain of the monoclonal antibody includes amino acids 26-33 (CDR1), 51-58 (CDR2) and 97-114 (CDR3) of SEQ ID NO: 3, and the light chain variable domain and includes a light chain variable domain including amino acids 27-30 (CDR1), 48-50 (CDR2) and 87-91 (CDR3) of SEQ ID NO: 7, wherein the antibody specifically binds gp120 and wherein the antibody is neutralizing. In yet other embodiments, the isolated monoclonal antibody includes a heavy chain variable domain including amino acids 26-33 (CDR1), 51-58 (CDR2) and 97-114 (CDR3) of SEQ ID NO: 4, and includes a light chain variable domain including amino acids 27-30 (CDR1), 48-50 (CDR2) and 87-91 (CDR3) of SEQ ID NO: 8, wherein the antibody specifically binds gp120 of HIV-1, and wherein the antibody is neutralizing

[0498] In yet other embodiments, the isolated monoclonal antibody includes a heavy chain variable domain including amino acids 26-33 (CDR1), 51-58 (CDR2) and 97-114 (CDR3) of SEQ ID NO: 1, and includes a light chain variable domain including amino acids 27-30 (CDR1), 48-50 (CDR2) and 87-91 (CDR3) of SEQ ID NO: 9, wherein the antibody specifically binds gp120 of HIV-1, and wherein the antibody is neutralizing. In additional embodiments, the heavy chain variable domain of the monoclonal antibody includes amino acids 26-33 (CDR1), 51-58 (CDR2) and 97-114 (CDR3) of SEQ ID NO: 3, and the light chain variable domain and includes a light chain variable domain including amino acids 27-30 (CDR1), 48-50 (CDR2) and 87-91 (CDR3) of SEQ ID NO: 9, wherein the antibody specifically binds gp120 and wherein the antibody is neutralizing. In yet other embodiments, the isolated monoclonal antibody includes a heavy chain variable domain including amino acids 26-33 (CDR1), 51-58 (CDR2) and 97-114 (CDR3) of SEQ ID NO: 4, and includes a light chain variable domain including amino acids 27-30 (CDR1), 48-50 (CDR2) and 87-91 (CDR3) of SEQ ID NO: 9, wherein the antibody specifically binds gp120 of HIV-1, and wherein the antibody is neutralizing

[0499] In yet other embodiments, the isolated monoclonal antibody includes a heavy chain variable domain including amino acids 26-33 (CDR1), 51-58 (CDR2) and/or 97-114 (CDR3) of SEQ ID NO: 30, and includes a light chain variable domain including amino acids 27-30 (CDR1), 48-50 (CDR2) and/or 87-91 (CDR3) of SEQ ID NO: 6, wherein the antibody specifically binds gp120 of HIV-1, and wherein the antibody is neutralizing. In specific non-limiting examples, the isolated monoclonal antibody includes a heavy chain variable domain including amino acids 26-33 (CDR1), 51-58 (CDR2) and 97-114 (CDR3) of SEQ ID NO: 30, and includes a light chain variable domain including amino acids 27-30 (CDR1), 48-50 (CDR2) and 87-91 (CDR3) of SEQ ID NO: 6, wherein the antibody specifically binds gp120 of HIV-1, and wherein the antibody is neutralizing. In additional non-limiting examples, the isolated monoclonal antibody includes a heavy chain variable domain including amino acids 26-33 (CDR1), 51-58 (CDR2) and/or 97-114 (CDR3) of one of SEQ ID NOs: 31-36, and includes a light chain variable domain including amino acids 27-30 (CDR1), 48-50 (CDR2) and/or 87-91 (CDR3) of SEQ ID NO: 6, wherein the antibody specifically binds gp120 of HIV-1, and wherein the antibody is neutralizing. In more non-limiting examples, the isolated monoclonal antibody includes a heavy chain variable domain including amino acids 26-33 (CDR1), 51-58 (CDR2) and 97-114 (CDR3) of one of SEQ ID NOs: 31-36, and includes a light chain variable domain including amino acids 27-30 (CDR1), 48-50 (CDR2) and 87-91 (CDR3) of SEQ ID NO: 6, wherein the antibody specifically binds gp120 of HIV-1, and wherein the antibody is neutralizing. In several embodiments, the antibody is not self-reactive, and/or has low self-reactivity. In additional embodiments, the antibody is not immunogenic and/or has low immunogenicity.

[0500] In further embodiments, the isolated monoclonal antibody includes a heavy chain variable domain including amino acids 26-33 (CDR1), 51-58 (CDR2) and/or 97-114 (CDR3) of SEQ ID NO: 30, and includes a light chain variable domain including amino acids 27-30 (CDR1), 48-50 (CDR2) and/or 87-91 (CDR3) of SEQ ID NO: 7, wherein the antibody specifically binds gp120 and wherein the antibody is neutralizing. In specific non-limiting examples, the isolated monoclonal antibody includes a heavy chain variable domain including amino acids 26-33 (CDR1), 51-58 (CDR2) and 97-114 (CDR3) of SEQ ID NO: 30, and includes a light chain variable domain including amino acids 27-30 (CDR1), 48-50 (CDR2) and 87-91 (CDR3) of SEQ ID NO: 7, wherein the antibody specifically binds gp120 and wherein the antibody is neutralizing. In additional non-limiting examples, the isolated monoclonal antibody includes a heavy chain variable domain including amino acids 26-33 (CDR1), 51-58 (CDR2) and/or 97-114 (CDR3) of one of SEQ ID NOs: 31-36, and includes a light chain variable domain including amino acids 27-30 (CDR1), 48-50 (CDR2) and/or 87-91 (CDR3) of SEQ ID NO: 7, wherein the antibody specifically binds gp120 and wherein the antibody is neutralizing. In more non-limiting examples, the isolated monoclonal antibody includes a heavy chain variable domain including amino acids 26-33 (CDR1), 51-58 (CDR2) and 97-114 (CDR3) of one of SEQ ID NOs: 31-36, and includes a light chain variable domain including amino acids 27-30 (CDR1), 48-50 (CDR2) and 87-91 (CDR3) of SEQ ID NO: 7, wherein the antibody specifically binds gp120 and wherein the antibody is neutralizing. In several embodiments, the antibody is not self-reactive, and/or has low self-reactivity. In additional embodiments, the antibody is not immunogenic and/or has low immunogenicity.

[0501] In some embodiments, the isolated monoclonal antibody includes a heavy chain variable domain including amino acids 26-33 (CDR1), 51-58 (CDR2) and/or 97-114 (CDR3) of SEQ ID NO: 30, and includes a light chain variable domain including amino acids 27-30 (CDR1), 48-50 (CDR2) and/or 87-91 (CDR3) of SEQ ID NO: 8, wherein the antibody specifically binds gp120 and wherein the antibody is neutralizing. In some non-limiting examples, the isolated monoclonal antibody includes a heavy chain variable domain including amino acids 26-33 (CDR1), 51-58 (CDR2) and 97-114 (CDR3) of SEQ ID NO: 30, and includes a light chain variable domain including amino acids 27-30 (CDR1), 48-50 (CDR2) and 87-91 (CDR3) of SEQ ID NO: 8, wherein the antibody specifically binds gp120 and wherein the antibody is neutralizing. In additional non-limiting examples, the isolated monoclonal antibody includes a heavy chain variable domain including amino acids 26-33 (CDR1), 51-58 (CDR2) and/or 97-114 (CDR3) of one of SEQ ID NOs: 31-36, and includes a light chain variable domain including amino acids 27-30 (CDR1), 48-50 (CDR2) and/or 87-91 (CDR3) of SEQ ID NO: 8, wherein the antibody specifically binds gp120 and wherein the antibody is neutralizing. In more non-limiting examples, the isolated monoclonal antibody includes a heavy chain variable domain including amino acids 26-33 (CDR1), 51-58 (CDR2) and 97-114 (CDR3) of one of SEQ ID NOs: 31-36, and includes a light chain variable domain including amino acids 27-30 (CDR1), 48-50 (CDR2) and 87-91 (CDR3) of SEQ ID NO: 8, wherein the antibody specifically binds gp120 and wherein the antibody is neutralizing. In several embodiments, the antibody is not self-reactive, and/or has low self-reactivity. In additional embodiments, the antibody is not immunogenic and/or has low immunogenicity.

[0502] In yet other embodiments, the isolated monoclonal antibody includes a heavy chain variable domain including amino acids 26-33 (CDR1), 51-58 (CDR2) and/or 97-114 (CDR3) of SEQ ID NO: 30, and includes a light chain variable domain including amino acids 27-30 (CDR1), 48-50 (CDR2) and/or 87-91 (CDR3) of SEQ ID NO: 9, wherein the antibody specifically binds gp120 of HIV-1, and wherein the antibody is neutralizing. In some non-limiting examples, the isolated monoclonal antibody includes a heavy chain variable domain including amino acids 26-33 (CDR1), 51-58 (CDR2) and 97-114 (CDR3) of SEQ ID NO: 30, and includes a light chain variable domain including amino acids 27-30 (CDR1), 48-50 (CDR2) and 87-91 (CDR3) of SEQ ID NO: 9, wherein the antibody specifically binds gp120 of HIV-1, and wherein the antibody is neutralizing. In specific non-limiting examples, the isolated monoclonal antibody includes a heavy chain variable domain including amino acids 26-33 (CDR1), 51-58 (CDR2) and/or 97-114 (CDR3) of one of SEQ ID NOs: 31-36, and includes a light chain variable domain including amino acids 27-30 (CDR1), 48-50 (CDR2) and/or 87-91 (CDR3) of SEQ ID NO: 9, wherein the antibody specifically binds gp120 of HIV-1, and wherein the antibody is neutralizing. In more non-limiting examples, the isolated monoclonal antibody includes a heavy chain variable domain including amino acids 26-33 (CDR1), 51-58 (CDR2) and 97-114 (CDR3) of one of SEQ ID NOs: 31-36, and includes a light chain variable domain including amino acids 27-30 (CDR1), 48-50 (CDR2) and 87-91 (CDR3) of SEQ ID NO: 9, wherein the antibody specifically binds gp120 of HIV-1, and wherein the antibody is neutralizing. In several embodiments, the antibody is not self-reactive, and/or has low self-reactivity. In additional embodiments, the antibody is not immunogenic and/or has low immunogenicity.

[0503] In additional embodiments, the isolated monoclonal antibody includes a heavy chain variable domain including amino acids 26-33 (CDR1), 51-58 (CDR2) and/or 97-114 (CDR3) of SEQ ID NO: 30, and includes a light chain variable domain including amino acids 27-30 (CDR1), 48-50 (CDR2) and/or 87-91 (CDR3) of SEQ ID NO: 27, wherein the antibody specifically binds gp120 and wherein the antibody is neutralizing. In some non-limiting examples, the isolated monoclonal antibody includes a heavy chain variable domain including amino acids 26-33 (CDR1), 51-58 (CDR2) and 97-114 (CDR3) of SEQ ID NO: 30, and includes a light chain variable domain including amino acids 27-30 (CDR1), 48-50 (CDR2) and 87-91 (CDR3) of SEQ ID NO: 27, wherein the antibody specifically binds gp120 and wherein the antibody is neutralizing. In additional non-limiting examples, the isolated monoclonal antibody includes a heavy chain variable domain including amino acids 26-33 (CDR1), 51-58 (CDR2) and/or 97-114 (CDR3) of one of SEQ ID NOs: 31-36, and includes a light chain variable domain including amino acids 27-30 (CDR1), 48-50 (CDR2) and/or 87-91 (CDR3) of SEQ ID NO: 27, wherein the antibody specifically binds gp120 and wherein the antibody is neutralizing. In more non-limiting examples, the isolated monoclonal antibody includes a heavy chain variable domain including amino acids 26-33 (CDR1), 51-58 (CDR2) and 97-114 (CDR3) of one of SEQ ID NOs: 31-36, and includes a light chain variable domain including amino acids 27-30 (CDR1), 48-50 (CDR2) and 87-91 (CDR3) of SEQ ID NO: 27, wherein the antibody specifically binds gp120 and wherein the antibody is neutralizing. In several embodiments, the antibody is not self-reactive, and/or has low self-reactivity. In additional embodiments, the antibody is not immunogenic and/or has low immunogenicity.

[0504] In several examples, the monoclonal antibody includes a heavy chain variable domain including SEQ ID NO: 30 and a light chain variable domain including SEQ ID NO: 6. In other examples, the monoclonal antibody includes a heavy chain variable domain including SEQ ID NO: 30 and a light chain variable domain including SEQ ID NO: 7. In yet other examples, the monoclonal antibody includes a heavy chain variable domain including SEQ ID NO: 30 and a light chain variable domain including SEQ ID NO: 8. In additional examples, the monoclonal antibody includes a heavy chain variable domain including SEQ ID NO: 30 and a light chain variable domain including SEQ ID NO: 9. In more examples, the monoclonal antibody includes a heavy chain variable domain including SEQ ID NO: 30 and a light chain variable domain including SEQ ID NO: 27.

[0505] In further examples, the monoclonal antibody includes a heavy chain variable domain including SEQ ID NO: 31 and a light chain variable domain including SEQ ID NO: 6. In other examples, the monoclonal antibody includes a heavy chain variable domain including SEQ ID NO: 31 and a light chain variable domain including SEQ ID NO: 7. In yet other examples, the monoclonal antibody includes a heavy chain variable domain including SEQ ID NO: 31 and a light chain variable domain including SEQ ID NO: 8. In additional examples, the monoclonal antibody includes a heavy chain variable domain including SEQ ID NO: 31 and a light chain variable domain including SEQ ID NO: 9. In more examples, the monoclonal antibody includes a heavy chain variable domain including SEQ ID NO: 31 and a light chain variable domain including SEQ ID NO: 27.

[0506] In more examples, the monoclonal antibody includes a heavy chain variable domain including SEQ ID NO: 32 and a light chain variable domain including SEQ ID NO: 6. In other examples, the monoclonal antibody includes a heavy chain variable domain including SEQ ID NO: 32 and a light chain variable domain including SEQ ID NO: 7. In yet other examples, the monoclonal antibody includes a heavy chain variable domain including SEQ ID NO: 32 and a light chain variable domain including SEQ ID NO: 8. In additional examples, the monoclonal antibody includes a heavy chain variable domain including SEQ ID NO: 32 and a light chain variable domain including SEQ ID NO: 9. In more examples, the monoclonal antibody includes a heavy chain variable domain including SEQ ID NO: 32 and a light chain variable domain including SEQ ID NO: 27.

[0507] In yet other examples, the monoclonal antibody includes a heavy chain variable domain including SEQ ID NO: 33 and a light chain variable domain including SEQ ID NO: 6. In other examples, the monoclonal antibody includes a heavy chain variable domain including SEQ ID NO: 33 and a light chain variable domain including SEQ ID NO: 7. In yet other examples, the monoclonal antibody includes a heavy chain variable domain including SEQ ID NO: 33 and a light chain variable domain including SEQ ID NO: 8. In additional examples, the monoclonal antibody includes a heavy chain variable domain including SEQ ID NO: 33 and a light chain variable domain including SEQ ID NO: 9. In more examples, the monoclonal antibody includes a heavy chain variable domain including SEQ ID NO: 33 and a light chain variable domain including SEQ ID NO: 27.

[0508] In some examples, the monoclonal antibody includes a heavy chain variable domain including SEQ ID NO: 34 and a light chain variable domain including SEQ ID NO: 6. In other examples, the monoclonal antibody includes a heavy chain variable domain including SEQ ID NO: 34 and a light chain variable domain including SEQ ID NO: 7. In yet other examples, the monoclonal antibody includes a heavy chain variable domain including SEQ ID NO: 34 and a light chain variable domain including SEQ ID NO: 8. In additional examples, the monoclonal antibody includes a heavy chain variable domain including SEQ ID NO: 34 and a light chain variable domain including SEQ ID NO: 9. In more examples, the monoclonal antibody includes a heavy chain variable domain including SEQ ID NO: 34 and a light chain variable domain including SEQ ID NO: 27.

[0509] In additional examples, the monoclonal antibody includes a heavy chain variable domain including SEQ ID NO: 35 and a light chain variable domain including SEQ ID NO: 6. In other examples, the monoclonal antibody includes a heavy chain variable domain including SEQ ID NO: 35 and a light chain variable domain including SEQ ID NO: 7. In yet other examples, the monoclonal antibody includes a heavy chain variable domain including SEQ ID NO: 35 and a light chain variable domain including SEQ ID NO: 8. In additional examples, the monoclonal antibody includes a heavy chain variable domain including SEQ ID NO: 35 and a light chain variable domain including SEQ ID NO: 9. In more examples, the monoclonal antibody includes a heavy chain variable domain including SEQ ID NO: 35 and a light chain variable domain including SEQ ID NO: 27.

[0510] In further examples, the monoclonal antibody includes a heavy chain variable domain including SEQ ID NO: 36 and a light chain variable domain including SEQ ID NO: 6. In other examples, the monoclonal antibody includes a heavy chain variable domain including SEQ ID NO: 36 and a light chain variable domain including SEQ ID NO: 7. In yet other examples, the monoclonal antibody includes a heavy chain variable domain including SEQ ID NO: 36 and a light chain variable domain including SEQ ID NO: 8. In additional examples, the monoclonal antibody includes a heavy chain variable domain including SEQ ID NO: 36 and a light chain variable domain including SEQ ID NO: 9. In more examples, the monoclonal antibody includes a heavy chain variable domain including SEQ ID NO: 36 and a light chain variable domain including SEQ ID NO: 27.

[0511] In yet other embodiments, the isolated monoclonal antibody includes a heavy chain variable domain including amino acids 26-33 (CDR1), 51-58 (CDR2) and/or 97-114 (CDR3) of SEQ ID NO: 38 or SEQ ID NO: 39, and includes a light chain variable domain including amino acids 27-30 (CDR1), 48-50 (CDR2) and/or 87-91 (CDR3) of SEQ ID NO: 6, wherein the antibody specifically binds gp120 of HIV-1, and wherein the antibody is neutralizing. In specific non-limiting examples, the isolated monoclonal antibody includes a heavy chain variable domain including amino acids 26-33 (CDR1), 51-58 (CDR2) and 97-114 (CDR3) of SEQ ID NO: 38 or SEQ ID NO: 39, and includes a light chain variable domain including amino acids 27-30 (CDR1), 48-50 (CDR2) and 87-91 (CDR3) of SEQ ID NO: 6, wherein the antibody specifically binds gp120 of HIV-1, and wherein the antibody is neutralizing. In several embodiments, the antibody is not self-reactive, and/or has low self-reactivity. In additional embodiments, the antibody is not immunogenic and/or has low immunogenicity.

[0512] In further embodiments, the isolated monoclonal antibody includes a heavy chain variable domain including amino acids 26-33 (CDR1), 51-58 (CDR2) and/or 97-114 (CDR3) of SEQ ID NO: 38 or SEQ ID NO: 39, and includes a light chain variable domain including amino acids 27-30 (CDR1), 48-50 (CDR2) and/or 87-91 (CDR3) of SEQ ID NO: 7, wherein the antibody specifically binds gp120 and wherein the antibody is neutralizing. In specific non-limiting examples, the isolated monoclonal antibody includes a heavy chain variable domain including amino acids 26-33 (CDR1), 51-58 (CDR2) and 97-114 (CDR3) of SEQ ID NO: 38 or SEQ ID NO: 39, and includes a light chain variable domain including amino acids 27-30 (CDR1), 48-50 (CDR2) and 87-91 (CDR3) of SEQ ID NO: 7, wherein the antibody specifically binds gp120 and wherein the antibody is neutralizing. In several embodiments, the antibody is not self-reactive, and/or has low self-reactivity. In additional embodiments, the antibody is not immunogenic and/or has low immunogenicity.

[0513] In some embodiments, the isolated monoclonal antibody includes a heavy chain variable domain including amino acids 26-33 (CDR1), 51-58 (CDR2) and/or 97-114 (CDR3) of SEQ ID NO: 38 or SEQ ID NO: 39, and includes a light chain variable domain including amino acids 27-30 (CDR1), 48-50 (CDR2) and/or 87-91 (CDR3) of SEQ ID NO: 8, wherein the antibody specifically binds gp120 and wherein the antibody is neutralizing. In some non-limiting examples, the isolated monoclonal antibody includes a heavy chain variable domain including amino acids 26-33 (CDR1), 51-58 (CDR2) and 97-114 (CDR3) of SEQ ID NO: 38 or SEQ ID NO: 39, and includes a light chain variable domain including amino acids 27-30 (CDR1), 48-50 (CDR2) and 87-91 (CDR3) of SEQ ID NO: 8, wherein the antibody specifically binds gp120 and wherein the antibody is neutralizing. In several embodiments, the antibody is not self-reactive, and/or has low self-reactivity. In additional embodiments, the antibody is not immunogenic and/or has low immunogenicity. In yet other embodiments, the isolated monoclonal antibody includes a heavy chain variable domain including amino acids 26-33 (CDR1), 51-58 (CDR2) and/or 97-114 (CDR3) of SEQ ID NO: 38 or SEQ ID NO: 39, and includes a light chain variable domain including amino acids 27-30 (CDR1), 48-50 (CDR2) and/or 87-91 (CDR3) of SEQ ID NO: 9, wherein the antibody specifically binds gp120 of HIV-1, and wherein the antibody is neutralizing. In some non-limiting examples, the isolated monoclonal antibody includes a heavy chain variable domain including amino acids 26-33 (CDR1), 51-58 (CDR2) and 97-114 (CDR3) of SEQ ID NO: 38 or SEQ ID NO: 39, and includes a light chain variable domain including amino acids 27-30 (CDR1), 48-50 (CDR2) and 87-91 (CDR3) of SEQ ID NO: 9, wherein the antibody specifically binds gp120 of HIV-1, and wherein the antibody is neutralizing. In several embodiments, the antibody is not self-reactive, and/or has low self-reactivity. In additional embodiments, the antibody is not immunogenic and/or has low immunogenicity.

[0514] In additional embodiments, the isolated monoclonal antibody includes a heavy chain variable domain including amino acids 26-33 (CDR1), 51-58 (CDR2) and/or 97-114 (CDR3) of SEQ ID NO: 38 or SEQ ID NO: 39, and includes a light chain variable domain including amino acids 27-30 (CDR1), 48-50 (CDR2) and/or 87-91 (CDR3) of SEQ ID NO: 27, wherein the antibody specifically binds gp120 and wherein the antibody is neutralizing. In some non-limiting examples, the isolated monoclonal antibody includes a heavy chain variable domain including amino acids 26-33 (CDR1), 51-58 (CDR2) and 97-114 (CDR3) of SEQ ID NO: 38 or SEQ ID NO: 39, and includes a light chain variable domain including amino acids 27-30 (CDR1), 48-50 (CDR2) and 87-91 (CDR3) of SEQ ID NO: 27, wherein the antibody specifically binds gp120 and wherein the antibody is neutralizing. In several embodiments, the antibody is not self-reactive, and/or has low self-reactivity. In additional embodiments, the antibody is not immunogenic and/or has low immunogenicity.

[0515] In several examples, the monoclonal antibody includes a heavy chain variable domain including SEQ ID NO: 38 and a light chain variable domain including SEQ ID NO: 6. In other examples, the monoclonal antibody includes a heavy chain variable domain including SEQ ID NO: 38 and a light chain variable domain including SEQ ID NO: 7. In yet other examples, the monoclonal antibody includes a heavy chain variable domain including SEQ ID NO: 38 and a light chain variable domain including SEQ ID NO: 8. In additional examples, the monoclonal antibody includes a heavy chain variable domain including SEQ ID NO: 38 and a light chain variable domain including SEQ ID NO: 9. In more examples, the monoclonal antibody includes a heavy chain variable domain including SEQ ID NO: 38 and a light chain variable domain including SEQ ID NO: 27.

[0516] In further examples, the monoclonal antibody includes a heavy chain variable domain including SEQ ID NO: 39 and a light chain variable domain including SEQ ID NO: 6. In other examples, the monoclonal antibody includes a heavy chain variable domain including SEQ ID NO: 39 and a light chain variable domain including SEQ ID NO: 7. In yet other examples, the monoclonal antibody includes a heavy chain variable domain including SEQ ID NO: 39 and a light chain variable domain including SEQ ID NO: 8. In additional examples, the monoclonal antibody includes a heavy chain variable domain including SEQ ID NO: 39 and a light chain variable domain including SEQ ID NO: 9. In more examples, the monoclonal antibody includes a heavy chain variable domain including SEQ ID NO: 39 and a light chain variable domain including SEQ ID NO: 27.

[0517] In some examples, the monoclonal antibody includes a heavy chain variable domain including SEQ ID NO: 1 and a light chain variable domain including SEQ ID NO: 6. In other examples, the monoclonal antibody includes a heavy chain variable domain including SEQ ID NO: 2 and a light chain variable domain including SEQ ID NO: 9. In yet other examples, the monoclonal antibody includes a heavy chain variable domain including SEQ ID NO: 3 and a light chain variable domain including SEQ ID NO: 7. In additional examples, examples, the monoclonal antibody includes a heavy chain variable domain including SEQ ID NO: 4 and a light chain variable domain including SEQ ID NO: 8. In more examples, the monoclonal antibody includes a heavy chain variable domain including SEQ ID NO: 3 and a light chain variable domain including SEQ ID NO: 9. In additional examples, examples, the monoclonal antibody includes a heavy chain variable domain including SEQ ID NO: 4 and a light chain variable domain including SEQ ID NO: 9.

[0518] In some embodiments, the isolated monoclonal antibody includes a heavy chain variable domain including amino acids 26-33 (CDR1), 51-58 (CDR2) and/or 97-114 (CDR3) of SEQ ID NO: 23, and includes a light chain variable domain including amino acids 27-30 (CDR1), 48-50 (CDR2) and/or 87-91 (CDR3) of SEQ ID NO: 9, wherein the antibody specifically binds gp120 of HIV-1, and wherein the antibody is neutralizing. In some embodiments, the isolated monoclonal antibody includes a heavy chain variable domain including amino acids 26-33 (CDR1), 51-58 (CDR2) and/or 97-114 (CDR3) of SEQ ID NO: 24, and includes a light chain variable domain including amino acids 27-30 (CDR1), 48-50 (CDR2) and/or 87-91 (CDR3) of SEQ ID NO: 9, wherein the antibody specifically binds gp120 of HIV-1, and wherein the antibody is neutralizing. In some embodiments, the isolated monoclonal antibody includes a heavy chain variable domain including amino acids 26-33 (CDR1), 51-58 (CDR2) and/or 97-114 (CDR3) of SEQ ID NO: 25 and includes a light chain variable domain including amino acids 27-30 (CDR1), 48-50 (CDR2) and/or 87-91 (CDR3) of SEQ ID NO: 9, wherein the antibody specifically binds gp120 of HIV-1, and wherein the antibody is neutralizing. In some embodiments, the isolated monoclonal antibody includes a heavy chain variable domain including amino acids 26-33 (CDR1), 51-58 (CDR2) and/or 97-114 (CDR3) of SEQ ID NO: 26, and includes a light chain variable domain including amino acids 27-30 (CDR1), 48-50 (CDR2) and/or 87-91 (CDR3) of SEQ ID NO: 9, wherein the antibody specifically binds gp120 of HIV-1, and wherein the antibody is neutralizing

[0519] In some embodiments, the isolated monoclonal antibody includes a heavy chain variable domain including amino acids 26-33 (CDR1), 51-58 (CDR2) and/or 97-114 (CDR3) of SEQ ID NO: 23, and includes a light chain variable domain including amino acids 27-30 (CDR1), 48-50 (CDR2) and/or 87-91 (CDR3) of SEQ ID NO: 27, wherein the antibody specifically binds gp120 of HIV-1, and wherein the antibody is neutralizing. In some embodiments, the isolated monoclonal antibody includes a heavy chain variable domain including amino acids 26-33 (CDR1), 51-58 (CDR2) and/or 97-114 (CDR3) of SEQ ID NO: 24, and includes a light chain variable domain including amino acids 27-30 (CDR1), 48-50 (CDR2) and/or 87-91 (CDR3) of SEQ ID NO: 27, wherein the antibody specifically binds gp120 of HIV-1, and wherein the antibody is neutralizing. In some embodiments, the isolated monoclonal antibody includes a heavy chain variable domain including amino acids 26-33 (CDR1), 51-58 (CDR2) and/or 97-114 (CDR3) of SEQ ID NO: 25 and includes a light chain variable domain including amino acids 27-30 (CDR1), 48-50 (CDR2) and/or 87-91 (CDR3) of SEQ ID NO: 27, wherein the antibody specifically binds gp120 of HIV-1, and wherein the antibody is neutralizing. In some embodiments, the isolated monoclonal antibody includes a heavy chain variable domain including amino acids 26-33 (CDR1), 51-58 (CDR2) and/or 97-114 (CDR3) of SEQ ID NO: 26, and includes a light chain variable domain including amino acids 27-30 (CDR1), 48-50 (CDR2) and/or 87-91 (CDR3) of SEQ ID NO: 27, wherein the antibody specifically binds gp120 of HIV-1, and wherein the antibody is neutralizing

[0520] In some embodiments, the isolated monoclonal antibody includes a heavy chain variable domain including amino acids 26-33 (CDR1), 51-58 (CDR2) and 97-114 (CDR3) of SEQ ID NO: 23, and includes a light chain variable domain including amino acids 27-30 (CDR1), 48-50 (CDR2) and 87-91 (CDR3) of SEQ ID NO: 9, wherein the antibody specifically binds gp120 of HIV-1, and wherein the antibody is neutralizing. In some embodiments, the isolated monoclonal antibody includes a heavy chain variable domain including amino acids 26-33 (CDR1), 51-58 (CDR2) and 97-114 (CDR3) of SEQ ID NO: 24, and includes a light chain variable domain including amino acids 27-30 (CDR1), 48-50 (CDR2) and 87-91 (CDR3) of SEQ ID NO: 9, wherein the antibody specifically binds gp120 of HIV-1, and wherein the antibody is neutralizing. In some embodiments, the isolated monoclonal antibody includes a heavy chain variable domain including amino acids 26-33 (CDR1), 51-58 (CDR2) and 97-114 (CDR3) of SEQ ID NO: 25 and includes a light chain variable domain including amino acids 27-30 (CDR1), 48-50 (CDR2) and 87-91 (CDR3) of SEQ ID NO: 9, wherein the antibody specifically binds gp120 of HIV-1, and wherein the antibody is neutralizing. In some embodiments, the isolated monoclonal antibody includes a heavy chain variable domain including amino acids 26-33 (CDR1), 51-58 (CDR2) and 97-114 (CDR3) of SEQ ID NO: 26, and includes a light chain variable domain including amino acids 27-30 (CDR1), 48-50 (CDR2) and 87-91 (CDR3) of SEQ ID NO: 9, wherein the antibody specifically binds gp120 of HIV-1, and wherein the antibody is neutralizing

[0521] In some embodiments, the isolated monoclonal antibody includes a heavy chain variable domain including amino acids 26-33 (CDR1), 51-58 (CDR2) and 97-114 (CDR3) of SEQ ID NO: 23, and includes a light chain variable domain including amino acids 27-30 (CDR1), 48-50 (CDR2) and 87-91 (CDR3) of SEQ ID NO: 27, wherein the antibody specifically binds gp120 of HIV-1, and wherein the antibody is neutralizing. In some embodiments, the isolated monoclonal antibody includes a heavy chain variable domain including amino acids 26-33 (CDR1), 51-58 (CDR2) and 97-114 (CDR3) of SEQ ID NO: 24, and includes a light chain variable domain including amino acids 27-30 (CDR1), 48-50 (CDR2) and 87-91 (CDR3) of SEQ ID NO: 27, wherein the antibody specifically binds gp120 of HIV-1, and wherein the antibody is neutralizing. In some embodiments, the isolated monoclonal antibody includes a heavy chain variable domain including amino acids 26-33 (CDR1), 51-58 (CDR2) and 97-114 (CDR3) of SEQ ID NO: 25 and includes a light chain variable domain including amino acids 27-30 (CDR1), 48-50 (CDR2) and 87-91 (CDR3) of SEQ ID NO: 27, wherein the antibody specifically binds gp120 of HIV-1, and wherein the antibody is neutralizing. In some embodiments, the isolated monoclonal antibody includes a heavy chain variable domain including amino acids 26-33 (CDR1), 51-58 (CDR2) and 97-114 (CDR3) of SEQ ID NO: 26, and includes a light chain variable domain including amino acids 27-30 (CDR1), 48-50 (CDR2) and 87-91 (CDR3) of SEQ ID NO: 27, wherein the antibody specifically binds gp120 of HIV-1, and wherein the antibody is neutralizing.

[0522] In some examples, the monoclonal antibody includes a heavy chain variable domain including SEQ ID NO: 23 and a light chain variable domain including SEQ ID NO: 9. In some examples, the monoclonal antibody includes a heavy chain variable domain including SEQ ID NO: 24 and a light chain variable domain including SEQ ID NO: 9. In some examples, the monoclonal antibody includes a heavy chain variable domain including SEQ ID NO: 25 and a light chain variable domain including SEQ ID NO: 9. In some examples, the monoclonal antibody includes a heavy chain variable domain including SEQ ID NO: 26 and a light chain variable domain including SEQ ID NO: 9. In some examples, the monoclonal antibody includes a heavy chain variable domain including SEQ ID NO: 23 and a light chain variable domain including SEQ ID NO: 27. In some examples, the monoclonal antibody includes a heavy chain variable domain including SEQ ID NO: 24 and a light chain variable domain including SEQ ID NO: 27. In some examples, the monoclonal antibody includes a heavy chain variable domain including SEQ ID NO: 25 and a light chain variable domain including SEQ ID NO: 27. In some examples, the monoclonal antibody includes a heavy chain variable domain including SEQ ID NO: 26 and a light chain variable domain including SEQ ID NO: 27.

[0523] In several embodiments, the monoclonal antibody includes the HCDR1, HCDR2 and/or HCDR3 or the LCDR1, LCDR2 and/or LCDR3 of one of the monoclonal antibody heavy or light chains encoded by one of the nucleic acid molecules listed in Table 2 or Table 3. In several embodiments, the monoclonal antibody includes the HCDR1, HCDR2 and HCDR3 or the LCDR1, LCDR2 and LCDR3 of one of the monoclonal antibody heavy or light chains encoded by one of the nucleic acid molecules listed in Table 2 or Table 3. In additional embodiments, the monoclonal antibody includes a heavy chain variable domain or a light chain variable domain of one of the heavy or light chains encoded by one of the nucleic acid molecules listed in Table 2 or Table 3. In further embodiments, the monoclonal antibody includes a heavy chain or a light chain of one of the heavy or light chains encoded by one of the nucleic acid molecules listed in Table 2 or Table 3.

[0524] 3. Additional Description of Monoclonal Antibodies

[0525] In some embodiments, the heavy chain of the antibody includes at least 1 (such as at least 2, at least 3, at least 4, at least 5, at least 6, at least 7, at least 8, at least 9, at least 10, at least 11, at least 12, or at least 13) amino acid substitutions compared to the amino acid sequence set forth as SEQ ID NO: 5 (VRC01 heavy chain variable domain). In some embodiments, the light chain of the antibody includes at least 1 (such as at least 2, at least 3, at least 4, at least 5, at least 6, at least 7, at least 8, at least 9, at least 10, at least 11, at least 12, or at least 13) amino acid substitutions compared to the amino acid sequence set forth as SEQ ID NO: 9 (VRC01 light chain variable domain). In some embodiments, the heavy chain of the antibody includes at least 1 (such as at least 2, at least 3, at least 4, at least 5, at least 6, at least 7, at least 8, at least 9, at least 10, at least 11, at least 12, or at least 13) amino acid substitutions compared to the amino acid sequence set forth as SEQ ID NO: 2 (VRC07 heavy chain variable domain).

[0526] In some examples, the disclosed monoclonal antibodies have a high affinity for gp120, such as a K_{D} of <3 nM for the antigenic epitope of gp120. In some embodiments, the VRC07 or variants of VRC07 compete with CD4 for binding to gp120.

[0527] Those of skill in the art will understand that a set of structure coordinates for the antibody or portions thereof in complex with gp120 or a portion thereof, is a relative set of points that define a shape in three dimensions. Thus, it is possible that an entirely different set of coordinates could define a similar or identical shape. Moreover, slight variations in the individual coordinates will have little effect on overall shape. The variations in coordinates discussed above may be generated because of mathematical manipulations of the structure coordinates.

[0528] In several embodiments, the antibody is not self-reactive, and/or has low self-reactivity. In additional embodiments, the antibody is not immunogenic and/or has low immunogenicity. In several embodiments, the disclosed monoclonal antibodies specifically bind to the CD4 binding site on gp120 with an affinity greater than that of VRC01, but are less immunogenic than VRC01 when administered to a subject. In additional embodiments, the disclosed monoclonal antibodies specifically bind to the CD4 binding site on gp120 with an affinity greater than that of VRC01, but are less self-reactive than VRC01.

[0529] In some non-limiting examples, a disclosed antibody that is not self-reactive, or has low self reactivity, completes competes poorly with an equal molar or less amount of a control antibody that is known to bind to self antigens. For example, the antibody can elicit about 50% or less inhibition, such as about 40%, 30%, 20% or 10% inhibition, of control antibody binding to anti-nuclear antigen and/or to cardiolipin. In additional non-limiting examples, the antibody has a five-fold or less, such as about six-fold, seven-fold, eight fold, nine-fold, or ten-fold less affinity for cardiolipin and/or nuclear antigen as compared to a control, such as a standard value or the affinity of the control antibody to cardiolipin and/or nuclear antigen, respectively.

[0530] In several embodiments, to optimize in vivo half-life, an LS mutation can be added to the FcRn receptor binding region of an antibody. This mutation has no effect on neutralization breadth or potency, but increases the half-life of the antibody by 2- to 3-fold in both humanized mice and non-human primates. Additional the LS mutation to a monoclonal antibody is known to the person of skill in the art (see, e.g., Zalevsky, et al., Nature Biotechnology, 28:157-159, 2010).

[0531] The monoclonal antibodies disclosed herein can be of any isotype. The monoclonal antibody can be, for example, an IgM or an IgG antibody, such as IgG₁or an IgG₂. The class of an antibody that specifically binds gp120 can be switched with another. In one aspect, a nucleic acid molecule encoding V_{L} or V_{H} is isolated using methods well-known in the art, such that it does not include any nucleic acid sequences encoding the constant region of the light or heavy chain, respectively.

[0532] The nucleic acid molecule encoding V_{L} or V_{H} is then operatively linked to a nucleic acid sequence encoding a C_{L} or C_{H} from a different class of immunoglobulin molecule. This can be achieved using a vector or nucleic acid molecule that includes a C_{L} or C_{H} chain, as known in the art. For example, an antibody that specifically binds gp120 that was originally IgM may be class switched to an IgG. Class switching can be used to convert one IgG subclass to another, such as from IgG₁ to IgG₂.

[0533] In some examples, the disclosed antibodies are oligomers of antibodies, such as dimers trimers, tetramers, pentamers, hexamers, septamers, octomers and so on. In some examples, the antibodies are pentamers. The antibodies can also be included in a bi-specific antibody.

[0534] Antibody fragments of the antibodies disclosed herein are provided, which include a heavy chain and light chain variable domain and specifically bind gp120. These antibody fragments retain the ability to selectively bind with the antigen and are “antigen-binding” fragments. These fragments include, but are not limited to:

[0535] (1) Fab, the fragment which contains a monovalent antigen-binding fragment of an antibody molecule, can be produced by digestion of whole antibody with the enzyme papain to yield an intact light chain and a portion of one heavy chain;

[0536] (2) Fab′, the fragment of an antibody molecule can be obtained by treating whole antibody with pepsin, followed by reduction, to yield an intact light chain and a portion of the heavy chain; two Fab′ fragments are obtained per antibody molecule;

[0537] (3) (Fab′)₂, the fragment of the antibody that can be obtained by treating whole antibody with the enzyme pepsin without subsequent reduction; F(ab′)₂ is a dimer of two Fab′ fragments held together by two disulfide bonds;

[0538] (4) Fv, a genetically engineered fragment containing the variable domain of the light chain and the variable domain of the heavy chain expressed as two chains; and

[0539] (5) Single chain antibody (such as scFv), defined as a genetically engineered molecule containing the variable domain of the light chain, the variable domain of the heavy chain, linked by a suitable polypeptide linker as a genetically fused single chain molecule.

[0540] (6) A dimer of a single chain antibody (scFV₂), defined as a dimer of a scFV. This has also been termed a “miniantibody.”

[0541] Methods of making these fragments are known in the art (see for example, Harlow and Lane, Antibodies: A Laboratory Manual, Cold Spring Harbor Laboratory, New York, 1988). In several examples, the variable domain included in the antibody is the variable domain of m912.

[0542] In a further group of embodiments, the antibodies are Fv antibodies, which are typically about 25 kDa and contain a complete antigen-binding site with three CDRs per each heavy chain and each light chain. To produce these antibodies, the V_{H} and the V_{L} can be expressed from two individual nucleic acid constructs in a host cell. In particular examples, the V_{H} amino acid sequence includes the CDRs from one of SEQ ID NOs: 1-4, 23-26, 30-36, 38-40, 199-201, 203-207, 216-218, or 258-260. In other examples, the V_{L} amino acid sequence includes the CDRs from SEQ ID NOs: 6-9 or 27, 41-44, 50-55, 209-215, or 219-257. In additional examples, the V_{H} amino acid sequence includes the amino acid sequence set forth as one of SEQ ID NOs: 1-4, 23-26, 30-36, 38-40, 199-201, 203-207, 216-218, or 258-260. In other examples, the V_{L} amino acid sequence includes the amino acid sequence set forth as one of SEQ ID NOs: 6-9 or 27, 41-44, 50-55, 209-215, or 219-257.

[0543] If the V_{H} and the V_{L} are expressed non-contiguously, the chains of the Fv antibody are typically held together by noncovalent interactions. However, these chains tend to dissociate upon dilution, so methods have been developed to crosslink the chains through glutaraldehyde, intermolecular disulfides, or a peptide linker. Thus, in one example, the Fv can be a disulfide stabilized Fv (dsFv), wherein the heavy chain variable domain and the light chain variable domain are chemically linked by disulfide bonds.

[0544] In an additional example, the Fv fragments include V_{H} and V_{L} chains connected by a peptide linker. These single-chain antigen binding proteins (scFv) are prepared by constructing a structural gene including DNA sequences encoding the V_{H} and V_{L} domains connected by an oligonucleotide. The structural gene is inserted into an expression vector, which is subsequently introduced into a host cell such as E. coli. The recombinant host cells synthesize a single polypeptide chain with a linker peptide bridging the two V domains. Methods for producing scFvs are known in the art (see Whitlow et al., Methods: a Companion to Methods in Enzymology, Vol. 2, page 97, 1991; Bird et al., Science 242:423, 1988; U.S. Pat. No. 4,946,778; Pack et al., Bio/Technology 11:1271, 1993; and Sandhu, supra). Dimers of a single chain antibody (scFV₂), are also contemplated.

[0545] Antibody fragments can be prepared by proteolytic hydrolysis of the antibody or by expression in E. coli of DNA encoding the fragment. Antibody fragments can be obtained by pepsin or papain digestion of whole antibodies by conventional methods. For example, antibody fragments can be produced by enzymatic cleavage of antibodies with pepsin to provide a 5S fragment denoted F(ab′)₂. This fragment can be further cleaved using a thiol reducing agent, and optionally a blocking group for the sulfhydryl groups resulting from cleavage of disulfide linkages, to produce 3.5S Fab′ monovalent fragments. Alternatively, an enzymatic cleavage using pepsin produces two monovalent Fab′ fragments and an Fc fragment directly (see U.S. Pat. No. 4,036,945 and U.S. Pat. No. 4,331,647, and references contained therein; Nisonhoff et al., Arch. Biochem. Biophys. 89:230, 1960; Porter, Biochem. J. 73:119, 1959; Edelman et al., Methods in Enzymology, Vol. 1, page 422, Academic Press, 1967; and Coligan et al. at sections 2.8.1-2.8.10 and 2.10.1-2.10.4).

[0546] Other methods of cleaving antibodies, such as separation of heavy chains to form monovalent light-heavy chain fragments, further cleavage of fragments, or other enzymatic, chemical, or genetic techniques may also be used, so long as the fragments bind to the antigen that is recognized by the intact antibody.

[0547] One of skill will realize that conservative variants of the antibodies can be produced. Such conservative variants employed in antibody fragments, such as dsFv fragments or in scFv fragments, will retain critical amino acid residues necessary for correct folding and stabilizing between the V_{H} and the V_{L} regions, and will retain the charge characteristics of the residues in order to preserve the low pI and low toxicity of the molecules. Amino acid substitutions (such as at most one, at most two, at most three, at most four, or at most five amino acid substitutions) can be made in the V_{H} and the V_{L} regions to increase yield. In particular examples, the V_{H} sequence is SEQ ID NOs: 1-4, 23-26, 30-36, 38-40, 199-201, 203-207, 216-218, or 258-260. In other examples, the V_{L} sequence is SEQ ID NOs: 6-9 or 27, 41-44, 50-55, 209-215, or 219-257. Conservative amino acid substitution tables providing functionally similar amino acids are well known to one of ordinary skill in the art. The following six groups are examples of amino acids that are considered to be conservative substitutions for one another:
[0548] 1) Alanine (A), Serine (S), Threonine (T);
[0549] 2) Aspartic acid (D), Glutamic acid (E);
[0550] 3) Asparagine (N), Glutamine (Q);
[0551] 4) Arginine (R), Lysine (K);
[0552] 5) Isoleucine (I), Leucine (L), Methionine (M), Valine (V); and
[0553] 6) Phenylalanine (F), Tyrosine (Y), Tryptophan (W).

[0554] The antibodies or antibody fragments disclosed herein can be derivatized or linked to another molecule (such as another peptide or protein). In general, the antibody or portion thereof is derivatized such that the binding to gp120 is not affected adversely by the derivatization or labeling. For example, the antibody can be functionally linked (by chemical coupling, genetic fusion, noncovalent association or otherwise) to one or more other molecular entities, such as another antibody (for example, a bispecific antibody or a diabody), a detection agent, a pharmaceutical agent, and/or a protein or peptide that can mediate associate of the antibody or antibody portion with another molecule (such as a streptavidin core region or a polyhistidine tag).

[0555] One type of derivatized antibody is produced by cross-linking two or more antibodies (of the same type or of different types, such as to create bispecific antibodies). Suitable crosslinkers include those that are heterobifunctional, having two distinctly reactive groups separated by an appropriate spacer (such as m-maleimidobenzoyl-N-hydroxysuccinimide ester) or homobifunctional (such as disuccinimidyl suberate). Such linkers are available from Pierce Chemical Company (Rockford, Ill.).

[0556] An antibody that specifically binds gp120 can be labeled with a detectable moiety. Useful detection agents include fluorescent compounds, including fluorescein, fluorescein isothiocyanate, rhodamine, 5-dimethylamine-1-napthalenesulfonyl chloride, phycoerythrin, lanthanide phosphors and the like. Bioluminescent markers are also of use, such as luciferase, Green fluorescent protein, Yellow fluorescent protein. An antibody can also be labeled with enzymes that are useful for detection, such as horseradish peroxidase, β-galactosidase, luciferase, alkaline phosphatase, glucose oxidase and the like. When an antibody is labeled with a detectable enzyme, it can be detected by adding additional reagents that the enzyme uses to produce a reaction product that can be discerned. For example, when the agent horseradish peroxidase is present the addition of hydrogen peroxide and diaminobenzidine leads to a colored reaction product, which is visually detectable. An antibody may also be labeled with biotin, and detected through indirect measurement of avidin or streptavidin binding. It should be noted that the avidin itself can be labeled with an enzyme or a fluorescent label.

[0557] An antibody may be labeled with a magnetic agent, such as gadolinium. Antibodies can also be labeled with lanthanides (such as europium and dysprosium), and manganese. Paramagnetic particles such as superparamagnetic iron oxide are also of use as labels. An antibody may also be labeled with a predetermined polypeptide epitopes recognized by a secondary reporter (such as leucine zipper pair sequences, binding sites for secondary antibodies, metal binding domains, epitope tags). In some embodiments, labels are attached by spacer arms of various lengths to reduce potential steric hindrance.

[0558] An antibody can also be labeled with a radiolabeled amino acid. The radiolabel may be used for both diagnostic and therapeutic purposes. Examples of labels for polypeptides include, but are not limited to, the following radioisotopes or radionucleotides: ³H, ¹⁴C, ¹⁵N, ³⁵S, ⁹⁰Y, ⁹⁹Tc, ¹¹¹In, ¹²⁵I, ¹³¹I.

[0559] An antibody can also be derivatized with a chemical group such as polyethylene glycol (PEG), a methyl or ethyl group, or a carbohydrate group. These groups may be useful to improve the biological characteristics of the antibody, such as to increase serum half-life or to increase tissue binding.

[0560] Means of detecting such labels are well known to those of skill in the art. Thus, for example, radiolabels may be detected using photographic film or scintillation counters, fluorescent markers may be detected using a photodetector to detect emitted illumination. Enzymatic labels are typically detected by providing the enzyme with a substrate and detecting the reaction product produced by the action of the enzyme on the substrate, and colorimetric labels are detected by simply visualizing the colored label.

[0561] B. Polynucleotides and Expression

[0562] Nucleic acid molecules (also referred to as polynucleotides) encoding the polypeptides provided herein (including, but not limited to antibodies) can readily be produced by one of skill in the art. For example, these nucleic acids can be produced using the amino acid sequences provided herein (such as the CDR sequences, heavy chain and light chain sequences), sequences available in the art (such as framework sequences), and the genetic code.

[0563] Exemplary V_{H} nucleic acid sequences are set forth as SEQ ID NOs: 10-13, 37, 57-101, 103, 105, 107-140, 145-156, 161-164, and 177-194, and include degenerate variants; exemplary V_{L} nucleic acid sequences are set forth as SEQ ID NOs: 14-16, 141-144, 157-160, and 165-176, and include degenerate variants thereof. One of skill in the art can readily use the genetic code to construct a variety of functionally equivalent nucleic acids, such as nucleic acids which differ in sequence but which encode the same antibody sequence, or encode a conjugate or fusion protein including the V_{L} and/or V_{H} nucleic acid sequence.

[0564] Nucleic acid sequences encoding the antibodies that specifically bind gp120 can be prepared by any suitable method including, for example, cloning of appropriate sequences or by direct chemical synthesis by methods such as the phosphotriester method of Narang et al., Meth. Enzymol. 68:90-99, 1979; the phosphodiester method of Brown et al., Meth. Enzymol. 68:109-151, 1979; the diethylphosphoramidite method of Beaucage et al., Tetra. Lett. 22:1859-1862, 1981; the solid phase phosphoramidite triester method described by Beaucage & Caruthers, Tetra. Letts. 22(20):1859-1862, 1981, for example, using an automated synthesizer as described in, for example, Needham-VanDevanter et al., Nucl. Acids Res. 12:6159-6168, 1984; and, the solid support method of U.S. Pat. No. 4,458,066. Chemical synthesis produces a single stranded oligonucleotide. This can be converted into double stranded DNA by hybridization with a complementary sequence or by polymerization with a DNA polymerase using the single strand as a template. One of skill would recognize that while chemical synthesis of DNA is generally limited to sequences of about 100 bases, longer sequences may be obtained by the ligation of shorter sequences.

[0565] Exemplary nucleic acids can be prepared by cloning techniques. Examples of appropriate cloning and sequencing techniques, and instructions sufficient to direct persons of skill through many cloning exercises are found in Sambrook et al., supra, Berger and Kimmel (eds.), supra, and Ausubel, supra. Product information from manufacturers of biological reagents and experimental equipment also provide useful information. Such manufacturers include the SIGMA™ Chemical Company (Saint Louis, Mo.), R&D Systems™ (Minneapolis, Minn.), Pharmacia Amersham (Piscataway, N.J.), CLONTECH™ Laboratories, Inc. (Palo Alto, Calif.), Chem Genes Corp., Aldrich Chemical Company (Milwaukee, Wis.), Glen Research, Inc., GIBCO™ BRL Life Technologies, Inc. (Gaithersburg, Md.), Fluka Chemica-Biochemika Analytika (Fluka Chemie AG, Buchs, Switzerland), INVITROGEN™ (Carlsbad, Calif.), and Applied Biosystems (Foster City, Calif.), as well as many other commercial sources known to one of skill.

[0566] Nucleic acids can also be prepared by amplification methods. Amplification methods include polymerase chain reaction (PCR), the ligase chain reaction (LCR), the transcription-based amplification system (TAS), the self-sustained sequence replication system (3SR). A wide variety of cloning methods, host cells, and in vitro amplification methodologies are well known to persons of skill.

[0567] Any of the nucleic acids encoding any of the antibodies, V_{H} and/or V_{L}, disclosed herein (or fragment thereof) can be expressed in a recombinantly engineered cell such as bacteria, plant, yeast, insect and mammalian cells. These antibodies can be expressed as individual V_{H} and/or V_{L} chain, or can be expressed as a fusion protein. An immunoadhesin can also be expressed. Thus, in some examples, nucleic acids encoding a V_{H} and V_{L}, and immunoadhesin are provided. The nucleic acid sequences can optionally encode a leader sequence.

[0568] To create a single chain antibody, (scFv) the V_{H}- and V_{L}-encoding DNA fragments are operatively linked to another fragment encoding a flexible linker, e.g., encoding the amino acid sequence (Gly₄-Ser)₃ (SEQ ID NO: 48), such that the V_{H} and V_{L} sequences can be expressed as a contiguous single-chain protein, with the V_{L} and V_{H} domains joined by the flexible linker (see, e.g., Bird et al., Science 242:423-426, 1988; Huston et al., Proc. Natl. Acad. Sci. USA 85:5879-5883, 1988; McCafferty et al., Nature 348:552-554, 1990). Optionally, a cleavage site can be included in a linker, such as a furin cleavage site.

[0569] The nucleic acid encoding the V_{H} and/or the V_{L} optionally can encode an Fc domain (immunoadhesin). The Fc domain can be an IgA, IgM or IgG Fc domain. The Fc domain can be an optimized Fc domain, as described in U.S. Published Patent Application No. 20100/093979, incorporated herein by reference. In one example, the immunoadhesin is an IgG₁ Fc.

[0570] The single chain antibody may be monovalent, if only a single V_{H} and V_{L} are used, bivalent, if two V_{H} and V_{L} are used, or polyvalent, if more than two V_{H} and V_{L} are used. Bispecific or polyvalent antibodies may be generated that bind specifically to gp120 and another antigen, such as, but not limited to gp41, or that bind two different gp120 epitopes. The encoded V_{H} and V_{L} optionally can include a furin cleavage site between the V_{H} and V_{L} domains.

[0571] It is expected that those of skill in the art are knowledgeable in the numerous expression systems available for expression of proteins including E. coli, other bacterial hosts, yeast, and various higher eukaryotic cells such as the COS, CHO, HeLa and myeloma cell lines.

[0572] The host cell can be a gram positive bacteria including, but not limited to, Bacillus, Streptococcus, Streptomyces, Staphylococcus, Enterococcus, Lactobacillus, Lactococcus, Clostridium, Geobacillus, and Oceanobacillus. Methods for expressing protein in gram positive bacteria, such as Lactobaccillus are well known in the art, see for example, U.S. Published Patent Application No. 20100/080774. Expression vectors for lactobacillus are described, for example in U.S. Pat. No. 6,100,388, and U.S. Pat. No. 5,728,571. Leader sequences can be included for expression in Lactobacillus. Gram negative bacteria include, but not limited to, E. coli, Pseudomonas, Salmonella, Campylobacter, Helicobacter, Flavobacterium, Fusobacterium, Ilyobacter, Neisseria, and Ureaplasma.

[0573] One or more DNA sequences encoding the antibody or fragment thereof can be expressed in vitro by DNA transfer into a suitable host cell. The cell may be prokaryotic or eukaryotic. The term also includes any progeny of the subject host cell. It is understood that all progeny may not be identical to the parental cell since there may be mutations that occur during replication. Methods of stable transfer, meaning that the foreign DNA is continuously maintained in the host, are known in the art. Hybridomas expressing the antibodies of interest are also encompassed by this disclosure.

[0574] The expression of nucleic acids encoding the isolated proteins described herein can be achieved by operably linking the DNA or cDNA to a promoter (which is either constitutive or inducible), followed by incorporation into an expression cassette. The promoter can be any promoter of interest, including a cytomegalovirus promoter and a human T cell lymphotrophic virus promoter (HTLV)-1. Optionally, an enhancer, such as a cytomegalovirus enhancer, is included in the construct. The cassettes can be suitable for replication and integration in either prokaryotes or eukaryotes. Typical expression cassettes contain specific sequences useful for regulation of the expression of the DNA encoding the protein. For example, the expression cassettes can include appropriate promoters, enhancers, transcription and translation terminators, initiation sequences, a start codon (i.e., ATG) in front of a protein-encoding gene, splicing signal for introns, sequences for the maintenance of the correct reading frame of that gene to permit proper translation of mRNA, and stop codons. The vector can encode a selectable marker, such as a marker encoding drug resistance (for example, ampicillin or tetracycline resistance).

[0575] To obtain high level expression of a cloned gene, it is desirable to construct expression cassettes which contain, at the minimum, a strong promoter to direct transcription, a ribosome binding site for translational initiation (internal ribosomal binding sequences), and a transcription/translation terminator. For E. coli, this includes a promoter such as the T7, trp, lac, or lambda promoters, a ribosome binding site, and preferably a transcription termination signal. For eukaryotic cells, the control sequences can include a promoter and/or an enhancer derived from, for example, an immunoglobulin gene, HTLV, SV40 or cytomegalovirus, and a polyadenylation sequence, and can further include splice donor and/or acceptor sequences (for example, CMV and/or HTLV splice acceptor and donor sequences). The cassettes can be transferred into the chosen host cell by well-known methods such as transformation or electroporation for E. coli and calcium phosphate treatment, electroporation or lipofection for mammalian cells. Cells transformed by the cassettes can be selected by resistance to antibiotics conferred by genes contained in the cassettes, such as the amp, gpt, neo and hyg genes.

[0576] When the host is a eukaryote, such methods of transfection of DNA as calcium phosphate coprecipitates, conventional mechanical procedures such as microinjection, electroporation, insertion of a plasmid encased in liposomes, or virus vectors may be used. Eukaryotic cells can also be cotransformed with polynucleotide sequences encoding the antibody, labeled antibody, or functional fragment thereof, and a second foreign DNA molecule encoding a selectable phenotype, such as the herpes simplex thymidine kinase gene. Another method is to use a eukaryotic viral vector, such as simian virus 40 (SV40) or bovine papilloma virus, to transiently infect or transform eukaryotic cells and express the protein (see for example, Eukaryotic Viral Vectors, Cold Spring Harbor Laboratory, Gluzman ed., 1982). One of skill in the art can readily use an expression systems such as plasmids and vectors of use in producing proteins in cells including higher eukaryotic cells such as the COS, CHO, HeLa and myeloma cell lines.

[0577] Modifications can be made to a nucleic acid encoding a polypeptide described herein without diminishing its biological activity. Some modifications can be made to facilitate the cloning, expression, or incorporation of the targeting molecule into a fusion protein. Such modifications are well known to those of skill in the art and include, for example, termination codons, a methionine added at the amino terminus to provide an initiation, site, additional amino acids placed on either terminus to create conveniently located restriction sites, or additional amino acids (such as poly His) to aid in purification steps. In addition to recombinant methods, the immunoconjugates, effector moieties, and antibodies of the present disclosure can also be constructed in whole or in part using standard peptide synthesis well known in the art.

[0578] Once expressed, the recombinant immunoconjugates, antibodies, and/or effector molecules can be purified according to standard procedures of the art, including ammonium sulfate precipitation, affinity columns, column chromatography, and the like (see, generally, R. Scopes, PROTEIN PURIFICATION, Springer-Verlag, N.Y., 1982). The antibodies, immunoconjugates and effector molecules need not be 100% pure. Once purified, partially or to homogeneity as desired, if to be used therapeutically, the polypeptides should be substantially free of endotoxin.

[0579] Methods for expression of antibodies and/or refolding to an appropriate active form, including single chain antibodies, from bacteria such as E. coli have been described and are well-known and are applicable to the antibodies disclosed herein. See, Buchner et al., Anal. Biochem. 205:263-270, 1992; Pluckthun, Biotechnology 9:545, 1991; Huse et al., Science 246:1275, 1989 and Ward et al., Nature 341:544, 1989.

[0580] Often, functional heterologous proteins from E. coli or other bacteria are isolated from inclusion bodies and require solubilization using strong denaturants, and subsequent refolding. During the solubilization step, as is well known in the art, a reducing agent must be present to separate disulfide bonds. An exemplary buffer with a reducing agent is: 0.1 M Tris pH 8, 6 M guanidine, 2 mM EDTA, 0.3 M DTE (dithioerythritol). Reoxidation of the disulfide bonds can occur in the presence of low molecular weight thiol reagents in reduced and oxidized form, as described in Saxena et al., Biochemistry 9: 5015-5021, 1970, and especially as described by Buchner et al., supra.

[0581] Renaturation is typically accomplished by dilution (for example, 100-fold) of the denatured and reduced protein into refolding buffer. An exemplary buffer is 0.1 M Tris, pH 8.0, 0.5 M L-arginine, 8 mM oxidized glutathione (GSSG), and 2 mM EDTA.

[0582] As a modification to the two chain antibody purification protocol, the heavy and light chain regions are separately solubilized and reduced and then combined in the refolding solution. An exemplary yield is obtained when these two proteins are mixed in a molar ratio such that a 5-fold molar excess of one protein over the other is not exceeded. Excess oxidized glutathione or other oxidizing low molecular weight compounds can be added to the refolding solution after the redox-shuffling is completed.

[0583] In addition to recombinant methods, the antibodies, labeled antibodies and functional fragments thereof that are disclosed herein can also be constructed in whole or in part using standard peptide synthesis. Solid phase synthesis of the polypeptides of less than about 50 amino acids in length can be accomplished by attaching the C-terminal amino acid of the sequence to an insoluble support followed by sequential addition of the remaining amino acids in the sequence. Techniques for solid phase synthesis are described by Barany & Merrifield, The Peptides: Analysis, Synthesis, Biology. Vol. 2: Special Methods in Peptide Synthesis, Part A. pp. 3-284; Merrifield et al., J. Am. Chem. Soc. 85:2149-2156, 1963, and Stewart et al., Solid Phase Peptide Synthesis, 2nd ed., Pierce Chem. Co., Rockford, Ill., 1984. Proteins of greater length may be synthesized by condensation of the amino and carboxyl termini of shorter fragments. Methods of forming peptide bonds by activation of a carboxyl terminal end (such as by the use of the coupling reagent N,N′-dicylohexylcarbodimide) are well known in the art.

[0584] B. Compositions and Therapeutic Methods

[0585] Methods are disclosed herein for the prevention or treatment of an HIV infection, such as an HIV-1 infection. Prevention can include inhibition of infection with HIV-1. The methods include contacting a cell with a therapeutically effective amount of the human monoclonal antibodies or antigen binding fragment thereof disclosed herein that specifically binds gp120, or an nucleic acid encoding such antibodies or antigen binding fragments. The method can also include administering to a subject a therapeutically effective amount of the human monoclonal antibodies or antigen binding fragments to a subject, or an nucleic acid encoding such antibodies or antigen binding fragments thereof. In some examples, the antibodies, or an antigen binding fragment or an nucleic acid encoding such antibodies or antigen binding fragments, can be used pre-exposure (for example, to prevent or inhibit HIV infection). In some examples, the antibodies, or an antigen binding fragment or an nucleic acid encoding such antibodies or antigen binding thereof, can be used in post-exposure prophylaxis. In some examples, antibodies or antigen binding fragment or an nucleic acid encoding such antibodies or antigen binding fragment, can be used to eliminate or reduce the viral reservoir of HIV in a subject. For example a therapeutically effective amount of an antibody or antigen binding fragment or an nucleic acid encoding such antibodies or antibody binding fragments can be administered to a subject being treated with anti-viral therapy. In some examples the antibodies, or an antibody binding fragment is modified such that it is directly cytotoxic to infected cells, or uses natural defenses such as complement, antibody dependent cellular cytotoxicity (ADCC), or phagocytosis by macrophages.

[0586] Methods to assay for neutralization activity include, but are not limited to, a single-cycle infection assay as described in Martin et al. (2003) Nature Biotechnology 21:71-76. In this assay, the level of viral activity is measured via a selectable marker whose activity is reflective of the amount of viable virus in the sample, and the IC50 is determined. In other assays, acute infection can be monitored in the PM1 cell line or in primary cells (normal PBMC). In this assay, the level of viral activity can be monitored by determining the p24 concentrations using ELISA. See, for example, Martin et al. (2003) Nature Biotechnology 21:71-76.

[0587] HIV infection does not need to be completely eliminated for the composition to be effective. For example, a composition can decrease HIV infection by a desired amount, for example by at least 10%, at least 20%, at least 50%, at least 60%, at least 70%, at least 80%, at least 90%, at least 95%, at least 98%, or even at least 100% (elimination of detectable HIV infected cells), as compared to HIV infection in the absence of the composition. In some embodiments, the cell is also contacted with a therapeutically effective amount of an additional agent, such as anti-viral agent. The cell can be in vivo or in vitro. The methods can include administration of one on more additional agents known in the art. In additional embodiments, HIV replication can be reduced or inhibited by similar methods. HIV replication does not need to be completely eliminated for the composition to be effective. For example, a composition can decrease HIV replication by a desired amount, for example by at least 10%, at least 20%, at least 50%, at least 60%, at least 70%, at least 80%, at least 90%, at least 95%, at least 98%, or even at least 100% (elimination of detectable HIV), as compared to HIV replication in the absence of the composition. In one example, the cell is also contacted with a therapeutically effective amount of an additional agent, such as anti-viral agent. The cell can be in vivo or in vitro.

[0588] Compositions are provided that include one or more of the antibodies that specifically bind gp120, or binding fragment thereof or a nucleic acid encoding such antibodies or antigen binding fragments, that are disclosed herein in a carrier. The compositions can be prepared in unit dosage forms for administration to a subject. The amount and timing of administration are at the discretion of the treating physician to achieve the desired purposes. The antibody can be formulated for systemic or local administration. In one example, the antibody that specifically binds gp120, or an antigen binding fragment thereof or a nucleic acid encoding such antibodies or antigen binding fragments, is formulated for parenteral administration, such as intravenous administration.

[0589] The compositions for administration can include a solution of the antibody that specifically binds gp120, or an antigen binding fragment thereof or an nucleic acid encoding such antibodies or antibody binding fragments, dissolved in a pharmaceutically acceptable carrier, such as an aqueous carrier. A variety of aqueous carriers can be used, for example, buffered saline and the like. These solutions are sterile and generally free of undesirable matter. These compositions may be sterilized by conventional, well known sterilization techniques. The compositions may contain pharmaceutically acceptable auxiliary substances as required to approximate physiological conditions such as pH adjusting and buffering agents, toxicity adjusting agents and the like, for example, sodium acetate, sodium chloride, potassium chloride, calcium chloride, sodium lactate and the like. The concentration of antibody in these formulations can vary widely, and will be selected primarily based on fluid volumes, viscosities, body weight and the like in accordance with the particular mode of administration selected and the subject's needs.

[0590] A typical pharmaceutical composition for intravenous administration includes about 0.1 to 10 mg of antibody per subject per day. Dosages from 0.1 up to about 100 mg per subject per day may be used, particularly if the agent is administered to a secluded site and not into the circulatory or lymph system, such as into a body cavity or into a lumen of an organ. Actual methods for preparing administrable compositions will be known or apparent to those skilled in the art and are described in more detail in such publications as Remington's Pharmaceutical Science, 19th ed., Mack Publishing Company, Easton, Pa. (1995).

[0591] Antibodies, or an antigen binding fragment thereof or an nucleic acid encoding such an antibodies or antigen binding fragments, may be provided in lyophilized form and rehydrated with sterile water before administration, although they are also provided in sterile solutions of known concentration. The antibody solution, or an antigen binding fragment or an nucleic acid encoding such antibodies or antibody binding fragments, is then added to an infusion bag containing 0.9% sodium chloride, USP, and typically administered at a dosage of from 0.5 to 15 mg/kg of body weight. Considerable experience is available in the art in the administration of antibody drugs, which have been marketed in the U.S. since the approval of RiTuxan® in 1997. Antibodies, or an antigen binding fragment thereof or an nucleic acid encoding such antibodies or antigen binding fragments, can be administered by slow infusion, rather than in an intravenous push or bolus. In one example, a higher loading dose is administered, with subsequent, maintenance doses being administered at a lower level. For example, an initial loading dose of 4 mg/kg may be infused over a period of some 90 minutes, followed by weekly maintenance doses for 4-8 weeks of 2 mg/kg infused over a 30 minute period if the previous dose was well tolerated.

[0592] A therapeutically effective amount of a gp120-specific antibody, or an antigen binding fragment thereof or an nucleic acid encoding such antibodies or antibody binding fragments, will depend upon the severity of the disease and/or infection and the general state of the patient's health. A therapeutically effective amount of the antibody is that which provides either subjective relief of a symptom(s) or an objectively identifiable improvement as noted by the clinician or other qualified observer. These compositions can be administered in conjunction with another therapeutic agent, either simultaneously or sequentially.

[0593] In one embodiment, administration of the antibody, or antibody binding fragment or an nucleic acid encoding such antibodies or antibody binding fragments, results in a reduction in the establishment of HIV infection and/or reducing subsequent HIV disease progression in a subject. A reduction in the establishment of HIV infection and/or a reduction in subsequent HIV disease progression encompass any statistically significant reduction in HIV activity. In some embodiments, methods are disclosed for treating a subject with an HIV-1 infection. These methods include administering to the subject a therapeutically effective amount of an antibody, or a nucleic acid encoding the antibody, thereby preventing or treating the HIV-1 infection.

[0594] Studies have shown that the rate of HIV transmission from mother to infant is reduced significantly when zidovudine is administered to HIV-infected women during pregnancy and delivery and to the offspring after birth (Connor et al., 1994 Pediatr Infect Dis J 14: 536-541). Several studies of mother-to-infant transmission of HIV have demonstrated a correlation between the maternal virus load at delivery and risk of HIV transmission to the child. The present disclosure provides isolated human monoclonal antibodies that are of use in decreasing HIV-transmission from mother to infant. Thus, in some examples, a therapeutically effective amount of a human gp120-specific antibody or antigen binding fragment thereof or nucleic acid encoding such antibodies or antibody antigen binding fragments, is administered in order to prevent transmission of HIV, or decrease the risk of transmission of HIV, from a mother to an infant. In some examples, a therapeutically effective amount of the antibody, or an antibody binding fragment or nucleic acid encoding such antibodies or antigen binding fragment, is administered to mother and/or to the child at childbirth. In other examples, a therapeutically effective amount of the antibody, antigen binding fragment, or nucleic acid encoding the antibody or antigen binding fragment is administered to the mother and/or infant prior to breast feeding in order to prevent viral transmission to the infant or decrease the risk of viral transmission to the infant. In some embodiments, both a therapeutically effective amount of the antibody, antigen binding fragment, or nucleic acid encoding the antibody or antigen binding fragment and a therapeutically effective amount of another agent, such as zidovudine, is administered to the mother and/or infant.

[0595] For any application, the antibody, antigen binding fragment, or nucleic acid encoding the antibody or antigen binding fragment can be combined with anti-retroviral therapy. Antiretroviral drugs are broadly classified by the phase of the retrovirus life-cycle that the drug inhibits. The disclosed antibodies can be administered in conjunction with nucleoside analog reverse-transcriptase inhibitors (such as zidovudine, didanosine, zalcitabine, stavudine, lamivudine, abacavir, emtricitabine, entecavir, and apricitabine), nucleotide reverse transcriptase inhibitors (such as tenofovir and adefovir), non-nucleoside reverse transcriptase inhibitors (such as efavirenz, nevirapine, delavirdine, etravirine, and rilpivirine), protease inhibitors (such as saquinavir, ritonavir, indinavir, nelfinavir, amprenavir, lopinavir, fosamprenavir, atazanavir, tipranavir, and darunavir), entry or fusion inhibitors (such as maraviroc and enfuvirtide), maturation inhibitors, (such as bevirimat and vivecon), or a broad spectrum inhibitors, such as natural antivirals. In some examples, a disclosed antibody or active fragment thereof or nucleic acids encoding such is administered in conjunction with IL-15, or conjugated to IL-15.

[0596] In some examples, a subject is further administered one or more additional antibodies that bind HIV glycoproteins, such as gp120 and gp41. Examples of neutralizing antibodies that can be administered in conjunction with the disclosed antibodies can be found in International Patent Publication No. WO 2011/038290, published Mar. 31, 2011, which is specifically incorporated herein by reference in its entirety.

[0597] Single or multiple administrations of the compositions including the antibody, antigen binding fragment, or nucleic acid encoding the antibody or antigen binding fragment, that are disclosed herein, are administered depending on the dosage and frequency as required and tolerated by the patient. In any event, the composition should provide a sufficient quantity of at least one of the antibodies disclosed herein to effectively treat the patient. The dosage can be administered once, but may be applied periodically until either a therapeutic result is achieved or until side effects warrant discontinuation of therapy. In one example, a dose of the antibody is infused for thirty minutes every other day. In this example, about one to about ten doses can be administered, such as three or six doses can be administered every other day. In a further example, a continuous infusion is administered for about five to about ten days. The subject can be treated at regular intervals, such as monthly, until a desired therapeutic result is achieved. Generally, the dose is sufficient to treat or ameliorate symptoms or signs of disease without producing unacceptable toxicity to the patient.

[0598] Controlled-release parenteral formulations can be made as implants, oily injections, or as particulate systems. For a broad overview of protein delivery systems see, Banga, A. J., Therapeutic Peptides and Proteins: Formulation, Processing, and Delivery Systems, Technomic Publishing Company, Inc., Lancaster, Pa., (1995). Particulate systems include microspheres, microparticles, microcapsules, nanocapsules, nanospheres, and nanoparticles. Microcapsules contain the therapeutic protein, such as a cytotoxin or a drug, as a central core. In microspheres the therapeutic is dispersed throughout the particle. Particles, microspheres, and microcapsules smaller than about 1 μm are generally referred to as nanoparticles, nanospheres, and nanocapsules, respectively. Capillaries have a diameter of approximately 5 μm so that only nanoparticles are administered intravenously. Microparticles are typically around 100 μm in diameter and are administered subcutaneously or intramuscularly. See, for example, Kreuter, J., Colloidal Drug Delivery Systems, J. Kreuter, ed., Marcel Dekker, Inc., New York, N.Y., pp. 219-342 (1994); and Tice & Tabibi, Treatise on Controlled Drug Delivery, A. Kydonieus, ed., Marcel Dekker, Inc. New York, N.Y., pp. 315-339, (1992).

[0599] Polymers can be used for ion-controlled release of the antibody compositions disclosed herein. Various degradable and nondegradable polymeric matrices for use in controlled drug delivery are known in the art (Langer, Accounts Chem. Res. 26:537-542, 1993). For example, the block copolymer, polaxamer 407, exists as a viscous yet mobile liquid at low temperatures but forms a semisolid gel at body temperature. It has been shown to be an effective vehicle for formulation and sustained delivery of recombinant interleukin-2 and urease (Johnston et al., Pharm. Res. 9:425-434, 1992; and Pec et al., J. Parent. Sci. Tech. 44(2):58-65, 1990). Alternatively, hydroxyapatite has been used as a microcarrier for controlled release of proteins (Ijntema et al., Int. J. Pharm. 112:215-224, 1994). In yet another aspect, liposomes are used for controlled release as well as drug targeting of the lipid-capsulated drug (Betageri et al., Liposome Drug Delivery Systems, Technomic Publishing Co., Inc., Lancaster, Pa. (1993)). Numerous additional systems for controlled delivery of therapeutic proteins are known (see U.S. Pat. No. 5,055,303; U.S. Pat. No. 5,188,837; U.S. Pat. No. 4,235,871; U.S. Pat. No. 4,501,728; U.S. Pat. No. 4,837,028; U.S. Pat. No. 4,957,735; U.S. Pat. No. 5,019,369; U.S. Pat. No. 5,055,303; U.S. Pat. No. 5,514,670; U.S. Pat. No. 5,413,797; U.S. Pat. No. 5,268,164; U.S. Pat. No. 5,004,697; U.S. Pat. No. 4,902,505; U.S. Pat. No. 5,506,206; U.S. Pat. No. 5,271,961; U.S. Pat. No. 5,254,342 and U.S. Pat. No. 5,534,496).

[0600] In some examples, a subject is administered the DNA encoding the antibody or antigen binding fragments thereof, or one or more of the CDRs grafted onto a protein scaffold, to provide in vivo antibody production, for example using the cellular machinery of the subject. Immunization by nucleic acid constructs is well known in the art and taught, for example, in U.S. Pat. No. 5,643,578, and U.S. Pat. No. 5,593,972 and U.S. Pat. No. 5,817,637. U.S. Pat. No. 5,880,103 describes several methods of delivery of nucleic acids encoding to an organism. The methods include liposomal delivery of the nucleic acids. Such methods can be applied to the production of an antibody, or antibody binding fragments thereof, by one of ordinary skill in the art.

[0601] One approach to administration of nucleic acids is direct administration with plasmid DNA, such as with a mammalian expression plasmid. The nucleotide sequence encoding the disclosed antibody, or antibody binding fragments thereof, can be placed under the control of a promoter to increase expression.

[0602] In another approach to using nucleic acids, a disclosed antibody, or antibody binding fragments thereof can also be expressed by attenuated viral hosts or vectors or bacterial vectors. Recombinant vaccinia virus, adeno-associated virus (AAV), herpes virus, retrovirus, cytomegalovirus or other viral vectors can be used to express the antibody. For example, vaccinia vectors and methods useful protocols are described in U.S. Pat. No. 4,722,848. BCG (Bacillus Calmette Guerin) provides another vector for expression of the disclosed antibodies (see Stover, Nature 351:456-460, 1991).

[0603] In one embodiment, a nucleic acid encoding a disclosed antibody, or antibody binding fragments thereof, is introduced directly into cells. For example, the nucleic acid can be loaded onto gold microspheres by standard methods and introduced into the skin by a device such as Bio-Rad's HELIOS™ Gene Gun. The nucleic acids can be “naked,” consisting of plasmids under control of a strong promoter.

[0604] Typically, the DNA is injected into muscle, although it can also be injected directly into other sites. Dosages for injection are usually around 0.5 μg/kg to about 50 mg/kg, and typically are about 0.005 mg/kg to about 5 mg/kg (see, e.g., U.S. Pat. No. 5,589,466).

[0605] C. Diagnostic Methods and Kits

[0606] A method is provided herein for the detection of the expression of gp120 in vitro or in vivo. In one example, expression of gp120 is detected in a biological sample, and can be used to detect HIV-1 infection as the presence of HIV-1 in a sample. The sample can be any sample, including, but not limited to, tissue from biopsies, autopsies and pathology specimens. Biological samples also include sections of tissues, for example, frozen sections taken for histological purposes. Biological samples further include body fluids, such as blood, serum, plasma, sputum, spinal fluid or urine.

[0607] In several embodiments, a method is provided for detecting AIDS and/or an HIV-1 infection in a subject. The disclosure provides a method for detecting HIV-1 in a biological sample, wherein the method includes contacting a biological sample with the antibody under conditions conducive to the formation of an immune complex, and detecting the immune complex, to detect the gp120 in the biological sample. In one example, the detection of gp120 in the sample indicates that the subject has an HIV infection. In another example, the detection of gp120 in the sample indicates that the subject has AIDS. In another example, detection of gp120 in the sample confirms a diagnosis of AIDS and/or an HIV-1 infection in a subject.

[0608] In some embodiments, the disclosed antibodies are used to test vaccines. For example to test if a vaccine composition assumes the same conformation as a gp120 peptide. Thus provided herein is a method for testing a vaccine, wherein the method includes contacting a sample containing the vaccine, such as a gp120 immunogen, with the antibody under conditions conducive to the formation of an immune complex, and detecting the immune complex, to detect the vaccine in the sample. In one example, the detection of the immune complex in the sample indicates that vaccine component, such as such as a gp120 immunogen assumes a conformation capable of binding the antibody.

[0609] In one embodiment, the antibody is directly labeled with a detectable label. In another embodiment, the antibody that binds gp120 (the first antibody) is unlabeled and a second antibody or other molecule that can bind the antibody that binds gp120 is utilized. As is well known to one of skill in the art, a second antibody is chosen that is able to specifically bind the specific species and class of the first antibody. For example, if the first antibody is a human IgG, then the secondary antibody may be an anti-human-IgG. Other molecules that can bind to antibodies include, without limitation, Protein A and Protein G, both of which are available commercially.

[0610] Suitable labels for the antibody or secondary antibody are described above, and include various enzymes, prosthetic groups, fluorescent materials, luminescent materials, magnetic agents and radioactive materials. Non-limiting examples of suitable enzymes include horseradish peroxidase, alkaline phosphatase, beta-galactosidase, or acetylcholinesterase. Non-limiting examples of suitable prosthetic group complexes include streptavidin/biotin and avidin/biotin. Non-limiting examples of suitable fluorescent materials include umbelliferone, fluorescein, fluorescein isothiocyanate, rhodamine, dichlorotriazinylamine fluorescein, dansyl chloride or phycoerythrin. A non-limiting exemplary luminescent material is luminol; a non-limiting exemplary a magnetic agent is gadolinium, and non-limiting exemplary radioactive labels include ¹²⁵I, ¹³¹I, ³⁵S or ³H.

[0611] The immunoassays and methods disclosed herein can be used for a number of purposes. Kits for detecting a polypeptide will typically include an antibody that binds gp120, such as any of the antibodies disclosed herein. In some embodiments, an antibody fragment, such as an Fv fragment or a Fab is included in the kit. In a further embodiment, the antibody is labeled (for example, with a fluorescent, radioactive, or an enzymatic label).

[0612] In one embodiment, a kit includes instructional materials disclosing means of use. The instructional materials may be written, in an electronic form (such as a computer diskette or compact disk) or may be visual (such as video files). The kits may also include additional components to facilitate the particular application for which the kit is designed. Thus, for example, the kit may additionally contain means of detecting a label (such as enzyme substrates for enzymatic labels, filter sets to detect fluorescent labels, appropriate secondary labels such as a secondary antibody, or the like). The kits may additionally include buffers and other reagents routinely used for the practice of a particular method. Such kits and appropriate contents are well known to those of skill in the art.

[0613] In one embodiment, the diagnostic kit includes an immunoassay. Although the details of the immunoassays may vary with the particular format employed, the method of detecting gp120 in a biological sample generally includes the steps of contacting the biological sample with an antibody which specifically reacts, under immunologically reactive conditions, to gp120. The antibody is allowed to specifically bind under immunologically reactive conditions to form an immune complex, and the presence of the immune complex (bound antibody) is detected directly or indirectly.

[0614] D. Exemplary Embodiments of the Disclosure

[0615] Clause 1. An isolated monoclonal antibody, comprising a heavy chain variable domain and a light chain variable domain, wherein a heavy chain variable domain of the antibody comprises amino acids 26-33 (CDR1), 51-58 (CDR2) and/or 97-114 (CDR3) of SEQ ID NO: 1, and wherein the antibody specifically binds gp120 of HIV-1, and wherein the antibody is neutralizing

[0616] Clause 2. The isolated monoclonal antibody of clause 1, wherein the heavy chain variable domain comprises one of:

[0617] (a) amino acids 26-33 (CDR1), 51-58 (CDR2) and/or 97-114 (CDR3) of SEQ ID NO: 2;

[0618] (b) amino acids 26-33 (CDR1), 51-58 (CDR2) and/or 97-114 (CDR3) of SEQ ID NO: 3;

[0619] (c) amino acids 26-33 (CDR1), 51-58 (CDR2) and/or 97-114 (CDR3) of SEQ ID NO: 4;

[0620] (d) amino acids 26-33 (CDR1), 51-58 (CDR2) and/or 97-114 (CDR3) of SEQ ID NO: 30; or

[0621] (e) amino acids 26-33 (CDR1), 51-58 (CDR2) and/or 97-114 (CDR3) of SEQ ID NO: 38.

[0622] Clause 3. The isolated human monoclonal antibody of clause 1, wherein the heavy chain domain of the antibody comprises amino acids 26-33 (CDR1), 51-58 (CDR2) and 97-114 (CDR3) of SEQ ID NO: 1.

[0623] Clause 4. The isolated monoclonal antibody of clause 1, wherein the heavy chain variable domain comprises one of:

[0624] (a) amino acids 26-33 (CDR1), 51-58 (CDR2) and 97-114 (CDR3) of SEQ ID NO: 2;

[0625] (b) amino acids 26-33 (CDR1), 51-58 (CDR2) and 97-114 (CDR3) of SEQ ID NO: 3;

[0626] (c) amino acids 26-33 (CDR1), 51-58 (CDR2) and 97-114 (CDR3) of SEQ ID NO: 4;

[0627] (d) amino acids 26-33 (CDR1), 51-58 (CDR2) and 97-114 (CDR3) of SEQ ID NO: 30; or

[0628] (e) amino acids 26-33 (CDR1), 51-58 (CDR2) and 97-114 (CDR3) of SEQ ID NO: 38.

[0629] Clause 5. The isolated monoclonal antibody of any one of clauses 1-4, wherein the heavy chain variable domain of the antibody comprises SEQ ID NO: 1.

[0630] Clause 6. The isolated monoclonal antibody of any one of clauses 1-5, wherein the heavy chain variable domain of the antibody comprises one of SEQ ID NO: 2-4.

[0631] Clause 7. The isolated monoclonal antibody of clause 1, wherein the heavy chain variable domain of the antibody comprises one of:

[0632] (a) amino acids 26-33 (CDR1), 51-58 (CDR2) and/or 97-114 (CDR3) of SEQ ID NO: 31;

[0633] (b) amino acids 26-33 (CDR1), 51-58 (CDR2) and/or 97-114 (CDR3) of SEQ ID NO: 32;

[0634] (c) amino acids 26-33 (CDR1), 51-58 (CDR2) and/or 97-114 (CDR3) of SEQ ID NO: 33;

[0635] (d) amino acids 26-33 (CDR1), 51-58 (CDR2) and/or 97-114 (CDR3) of SEQ ID NO: 34

[0636] (e) amino acids 26-33 (CDR1), 51-58 (CDR2) and/or 97-114 (CDR3) of SEQ ID NO: 35; or

[0637] (e) amino acids 26-33 (CDR1), 51-58 (CDR2) and/or 97-114 (CDR3) of SEQ ID NO: 36.

[0638] Clause 8. The isolated monoclonal antibody of clause 7, wherein the heavy chain variable domain of the antibody comprises one of:

[0639] (a) amino acids 26-33 (CDR1), 51-58 (CDR2) and 97-114 (CDR3) of SEQ ID NO: 31;

[0640] (b) amino acids 26-33 (CDR1), 51-58 (CDR2) and 97-114 (CDR3) of SEQ ID NO: 32;

[0641] (c) amino acids 26-33 (CDR1), 51-58 (CDR2) and 97-114 (CDR3) of SEQ ID NO: 33;

[0642] (d) amino acids 26-33 (CDR1), 51-58 (CDR2) and 97-114 (CDR3) of SEQ ID NO: 34

[0643] (e) amino acids 26-33 (CDR1), 51-58 (CDR2) and 97-114 (CDR3) of SEQ ID NO: 35; or

[0644] (e) amino acids 26-33 (CDR1), 51-58 (CDR2) and 97-114 (CDR3) of SEQ ID NO: 36.

[0645] Clause 9. The isolated monoclonal antibody of any one of clauses 7-8, wherein the heavy chain variable domain of the antibody comprises one of:

[0646] (a) SEQ ID NO: 31;

[0647] (b) SEQ ID NO: 32;

[0648] (c) SEQ ID NO: 33;

[0649] (d) SEQ ID NO: 34

[0650] (e) SEQ ID NO: 35; or

[0651] (e) SEQ ID NO: 36.

[0652] Clause 10. The isolated monoclonal antibody of clause 1, wherein the heavy chain variable domain comprises one of

[0653] (a) amino acids 26-33 (CDR1), 51-58 (CDR2) and/or 97-114 (CDR3) of SEQ ID NO: 38, wherein X₁₅ is Q; X₁₆ is V or I and X₁₇ is A or T;

[0654] (b) amino acids 26-33 (CDR1), 51-58 (CDR2) and/or 97-114 (CDR3) of SEQ ID NO: 38, wherein X₁₅ is Q or R; X₁₆ is V and X₁₇ is A or T;

[0655] (c) amino acids 26-33 (CDR1), 51-58 (CDR2) and/or 97-114 (CDR3) of SEQ ID NO: 38, wherein X₁₅ is Q or R; X₁₆ is V or I and X₁₇ is A;

[0656] (d) amino acids 26-33 (CDR1), 51-58 (CDR2) and/or 97-114 (CDR3) of SEQ ID NO: 38, wherein X₁₅ is Q; X₁₆ is V and X₁₇ is A or T;

[0657] (e) amino acids 26-33 (CDR1), 51-58 (CDR2) and/or 97-114 (CDR3) of SEQ ID NO: 38, wherein X₁₅ is Q or R; X₁₆ is V and X₁₇ is A;

[0658] (f) amino acids 26-33 (CDR1), 51-58 (CDR2) and/or 97-114 (CDR3) of SEQ ID NO: 38, wherein X₁₅ is Q; X₁₆ is V or I and X₁₇ is A; or

[0659] (g) amino acids 26-33 (CDR1), 51-58 (CDR2) and/or 97-114 (CDR3) of SEQ ID NO: 39.

[0660] Clause 11. The isolated monoclonal antibody of clause 10, wherein the heavy chain variable domain comprises one of

[0661] (a) amino acids 26-33 (CDR1), 51-58 (CDR2) and 97-114 (CDR3) of SEQ ID NO: 38, wherein X₁₅ is Q; X₁₆ is V or I and X₁₇ is A or T;

[0662] (b) amino acids 26-33 (CDR1), 51-58 (CDR2) and 97-114 (CDR3) of SEQ ID NO: 38, wherein X₁₅ is Q or R; X₁₆ is V and X₁₇ is A or T;

[0663] (c) amino acids 26-33 (CDR1), 51-58 (CDR2) and 97-114 (CDR3) of SEQ ID NO: 38, wherein X₁₅ is Q or R; X₁₆ is V or I and X₁₇ is A;

[0664] (d) amino acids 26-33 (CDR1), 51-58 (CDR2) and 97-114 (CDR3) of SEQ ID NO: 38, wherein X₁₅ is Q; X₁₆ is V and X₁₇ is A or T;

[0665] (e) amino acids 26-33 (CDR1), 51-58 (CDR2) and 97-114 (CDR3) of SEQ ID NO: 38, wherein X₁₅ is Q or R; X₁₆ is V and X₁₇ is A;

[0666] (f) amino acids 26-33 (CDR1), 51-58 (CDR2) and 97-114 (CDR3) of SEQ ID NO: 38, wherein X₁₅ is Q; X₁₆ is V or I and X₁₇ is A; or

[0667] (g) amino acids 26-33 (CDR1), 51-58 (CDR2) and 97-114 (CDR3) of SEQ ID NO: 39.

[0668] Clause 12. The isolated monoclonal antibody of clause 10 or clause 11, wherein the heavy chain variable domain comprises:

[0669] (a) the amino acid sequence set forth as SEQ ID NO: 38, wherein X₁₅ is Q; X₁₆ is V or I and X₁₇ is A or T;

[0670] (b) the amino acid sequence set forth as SEQ ID NO: 38, wherein X₁₅ is Q or R; X₁₆ is V and X₁₇ is A or T;

[0671] (c) the amino acid sequence set forth as SEQ ID NO: 38, wherein X₁₅ is Q or R; X₁₆ is V or I and X₁₇ is A;

[0672] (d) the amino acid sequence set forth as SEQ ID NO: 38, wherein X₁₅ is Q; X₁₆ is V and X₁₇ is A or T;

[0673] (e) the amino acid sequence set forth as SEQ ID NO: 38, wherein X₁₅ is Q or R; X₁₆ is V and X₁₇ is A;

[0674] (f) the amino acid sequence set forth as SEQ ID NO: 38, wherein X₁₅ is Q; X₁₆ is V or I and X₁₇ is A; or

[0675] (g) the amino acid sequence set forth as SEQ ID NO: 39.

[0676] Clause 13. An isolated monoclonal antibody, comprising a heavy chain variable domain and a light chain variable domain, wherein a heavy chain variable domain of the antibody comprises amino acids 26-33 (CDR1), 51-58 (CDR2) and/or 97-114 (CDR3) of SEQ ID NO: 23, and wherein the antibody specifically binds gp120 of HIV-1, and wherein the antibody is neutralizing

[0677] Clause 14. The isolated monoclonal antibody of clause 13, wherein the heavy chain variable domain comprises one of:

[0678] (a) amino acids 26-33 (CDR1), 51-58 (CDR2) and/or 97-114 (CDR3) of SEQ ID NO: 24;

[0679] (b) amino acids 26-33 (CDR1), 51-58 (CDR2) and/or 97-114 (CDR3) of SEQ ID NO: 25; or

[0680] (c) amino acids 26-33 (CDR1), 51-58 (CDR2) and/or 97-114 (CDR3) of SEQ ID NO: 26.

[0681] Clause 15. The isolated human monoclonal antibody of clause 13, wherein the heavy chain domain of the antibody comprises amino acids 26-33 (CDR1), 51-58 (CDR2) and 97-114 (CDR3) of SEQ ID NO: 23.

[0682] Clause 16. The isolated monoclonal antibody of clause 14, wherein the heavy chain variable domain comprises one of:

[0683] (a) amino acids 26-33 (CDR1), 51-58 (CDR2) and 97-114 (CDR3) of SEQ ID NO: 24;

[0684] (b) amino acids 26-33 (CDR1), 51-58 (CDR2) and 97-114 (CDR3) of SEQ ID NO: 25; or

[0685] (c) amino acids 26-33 (CDR1), 51-58 (CDR2) and 97-114 (CDR3) of SEQ ID NO: 26. Clause 17. The isolated monoclonal antibody of any one of clauses 2-6 or 13-15, wherein the heavy chain variable domain of the antibody comprises SEQ ID NO: 23.

[0686] Clause 18. The isolated monoclonal antibody of any one of 13-15, wherein the heavy chain variable domain of the antibody comprises one of SEQ ID NOs: 24-26.

[0687] Clause 19. The isolated monoclonal antibody of any one of clauses 1-18, wherein in the light chain variable domain of the isolated human monoclonal antibody includes amino acids 27-30 (CDR1), 48-50 (CDR2) and 87-91 (CDR3) of SEQ ID NO: 6.

[0688] Clause 20. The isolated monoclonal antibody of any one of clauses 1-18, wherein the light chain variable domain of the antibody comprises one of:

[0689] (a) amino acids 27-30 (CDR1), 48-50 (CDR2) and 87-91 (CDR3) of SEQ ID NO: 7;

[0690] (b) amino acids 27-30 (CDR1), 48-50 (CDR2) and 87-91 (CDR3) of SEQ ID NO: 8.

[0691] Clause 21. The isolated monoclonal antibody of any one of clauses 1-1, wherein in the light chain variable domain of the isolated human monoclonal antibody includes amino acids 27-30 (CDR1), 48-50 (CDR2) and 87-91 (CDR3) of SEQ ID NO: 9.

[0692] Clause 22. The isolated monoclonal antibody of any one of clauses 1-18, wherein in the light chain variable domain of the isolated human monoclonal antibody includes amino acids 27-30 (CDR1), 48-50 (CDR2) and 87-91 (CDR3) of SEQ ID NO: 27.

[0693] Clause 23. The isolated monoclonal antibody of any one of clauses 1-18, wherein the light chain variable domain of the antibody comprises SEQ ID NO: 6, SEQ ID NO: 7, SEQ ID NO: 8, SEQ ID NO: 9 or SEQ ID NO: 27.

[0694] Clause 24. The isolated monoclonal antibody of clause 1, wherein

[0695] (a) the heavy chain variable domain comprises amino acids 26-33 (CDR1), 51-58 (CDR2) and 97-114 (CDR3) of SEQ ID NO: 1, and the light chain variable domain comprises amino acids 27-30 (CDR1), 48-50 (CDR2) and 87-91 (CDR3) of SEQ ID NO: 6;

[0696] (b) the heavy chain variable domain comprises amino acids 26-33 (CDR1), 51-58 (CDR2) and 97-114 (CDR3) of SEQ ID NO: 2 and the light chain variable domain comprises amino acids 27-30 (CDR1), 48-50 (CDR2) and 87-91 (CDR3) of SEQ ID NO: 9;

[0697] (c) the heavy chain variable domain comprises amino acids 26-33 (CDR1), 51-58 (CDR2) and 97-114 (CDR3) of SEQ ID NO:3 and the light chain variable domain comprises amino acids 27-30 (CDR1), 48-50 (CDR2) and 87-91 (CDR3) of SEQ ID NO: 7; or

[0698] (d) the heavy chain variable domain comprises amino acids 26-33 (CDR1), 51-58 (CDR2) and 97-114 (CDR3) of SEQ ID NO: 4 and the light chain variable domain comprises amino acids 27-30 (CDR1), 48-50 (CDR2) and 87-91 (CDR3) of SEQ ID NO: 8.

[0699] Clause 25. The isolated monoclonal antibody of clause 13, wherein

[0700] (a) the heavy chain variable domain comprises amino acids 26-33 (CDR1), 51-58 (CDR2) and 97-114 (CDR3) of SEQ ID NO: 23 and the light chain variable domain comprises amino acids 27-30 (CDR1), 48-50 (CDR2) and 87-91 (CDR3) of SEQ ID NO: 9;

[0701] (b) the heavy chain variable domain comprises amino acids 26-33 (CDR1), 51-58 (CDR2) and 97-114 (CDR3) of SEQ ID NO: 24 and the light chain variable domain comprises amino acids 27-30 (CDR1), 48-50 (CDR2) and 87-91 (CDR3) of SEQ ID NO: 9;

[0702] (c) the heavy chain variable domain comprises amino acids 26-33 (CDR1), 51-58 (CDR2) and 97-114 (CDR3) of SEQ ID NO: 25 and the light chain variable domain comprises amino acids 27-30 (CDR1), 48-50 (CDR2) and 87-91 (CDR3) of SEQ ID NO: 9;

[0703] (d) the heavy chain variable domain comprises amino acids 26-33 (CDR1), 51-58 (CDR2) and 97-114 (CDR3) of SEQ ID NO: 26 and the light chain variable domain comprises amino acids 27-30 (CDR1), 48-50 (CDR2) and 87-91 (CDR3) of SEQ ID NO: 9;

[0704] (e) the heavy chain variable domain comprises amino acids 26-33 (CDR1), 51-58 (CDR2) and 97-114 (CDR3) of SEQ ID NO: 23 and the light chain variable domain comprises amino acids 27-30 (CDR1), 48-50 (CDR2) and 87-91 (CDR3) of SEQ ID NO: 27;

[0705] (f) the heavy chain variable domain comprises amino acids 26-33 (CDR1), 51-58 (CDR2) and 97-114 (CDR3) of SEQ ID NO: 24 and the light chain variable domain comprises amino acids 27-30 (CDR1), 48-50 (CDR2) and 87-91 (CDR3) of SEQ ID NO: 27;

[0706] (g) the heavy chain variable domain comprises amino acids 26-33 (CDR1), 51-58 (CDR2) and 97-114 (CDR3) of SEQ ID NO: 25 and the light chain variable domain comprises amino acids 27-30 (CDR1), 48-50 (CDR2) and 87-91 (CDR3) of SEQ ID NO: 27; or

[0707] (h) the heavy chain variable domain comprises amino acids 26-33 (CDR1), 51-58 (CDR2) and 97-114 (CDR3) of SEQ ID NO: 26 and the light chain variable domain comprises amino acids 27-30 (CDR1), 48-50 (CDR2) and 87-91 (CDR3) of SEQ ID NO: 27.

[0708] Clause 26. The isolated monoclonal antibody of any one of clauses 7-9, wherein

[0709] (a) the heavy chain variable domain comprises amino acids 26-33 (CDR1), 51-58 (CDR2) and 97-114 (CDR3) of SEQ ID NO: 30, and the light chain variable domain comprises amino acids 27-30 (CDR1), 48-50 (CDR2) and 87-91 (CDR3) of SEQ ID NO: 6;

[0710] (b) the heavy chain variable domain comprises amino acids 26-33 (CDR1), 51-58 (CDR2) and 97-114 (CDR3) of SEQ ID NO: 30 and the light chain variable domain comprises amino acids 27-30 (CDR1), 48-50 (CDR2) and 87-91 (CDR3) of SEQ ID NO: 9;

[0711] (c) the heavy chain variable domain comprises amino acids 26-33 (CDR1), 51-58 (CDR2) and 97-114 (CDR3) of SEQ ID NO:30 and the light chain variable domain comprises amino acids 27-30 (CDR1), 48-50 (CDR2) and 87-91 (CDR3) of SEQ ID NO: 7;

[0712] (d) the heavy chain variable domain comprises amino acids 26-33 (CDR1), 51-58 (CDR2) and 97-114 (CDR3) of SEQ ID NO: 30 and the light chain variable domain comprises amino acids 27-30 (CDR1), 48-50 (CDR2) and 87-91 (CDR3) of SEQ ID NO: 8;

[0713] (e) the heavy chain variable domain comprises amino acids 26-33 (CDR1), 51-58 (CDR2) and 97-114 (CDR3) of SEQ ID NO: 30 and the light chain variable domain comprises amino acids 27-30 (CDR1), 48-50 (CDR2) and 87-91 (CDR3) of SEQ ID NO: 27;

[0714] (f) the heavy chain variable domain comprises amino acids 26-33 (CDR1), 51-58 (CDR2) and 97-114 (CDR3) of SEQ ID NO: 31, and the light chain variable domain comprises amino acids 27-30 (CDR1), 48-50 (CDR2) and 87-91 (CDR3) of SEQ ID NO: 6;

[0715] (g) the heavy chain variable domain comprises amino acids 26-33 (CDR1), 51-58 (CDR2) and 97-114 (CDR3) of SEQ ID NO: 31 and the light chain variable domain comprises amino acids 27-30 (CDR1), 48-50 (CDR2) and 87-91 (CDR3) of SEQ ID NO: 9;

[0716] (h) the heavy chain variable domain comprises amino acids 26-33 (CDR1), 51-58 (CDR2) and 97-114 (CDR3) of SEQ ID NO: 31 and the light chain variable domain comprises amino acids 27-30 (CDR1), 48-50 (CDR2) and 87-91 (CDR3) of SEQ ID NO: 7;

[0717] (i) the heavy chain variable domain comprises amino acids 26-33 (CDR1), 51-58 (CDR2) and 97-114 (CDR3) of SEQ ID NO: 31 and the light chain variable domain comprises amino acids 27-30 (CDR1), 48-50 (CDR2) and 87-91 (CDR3) of SEQ ID NO: 8;

[0718] (j) the heavy chain variable domain comprises amino acids 26-33 (CDR1), 51-58 (CDR2) and 97-114 (CDR3) of SEQ ID NO: 31 and the light chain variable domain comprises amino acids 27-30 (CDR1), 48-50 (CDR2) and 87-91 (CDR3) of SEQ ID NO: 27;

[0719] (k) the heavy chain variable domain comprises amino acids 26-33 (CDR1), 51-58 (CDR2) and 97-114 (CDR3) of SEQ ID NO: 32, and the light chain variable domain comprises amino acids 27-30 (CDR1), 48-50 (CDR2) and 87-91 (CDR3) of SEQ ID NO: 6;

[0720] (l) the heavy chain variable domain comprises amino acids 26-33 (CDR1), 51-58 (CDR2) and 97-114 (CDR3) of SEQ ID NO: 32 and the light chain variable domain comprises amino acids 27-30 (CDR1), 48-50 (CDR2) and 87-91 (CDR3) of SEQ ID NO: 9;

[0721] (m) the heavy chain variable domain comprises amino acids 26-33 (CDR1), 51-58 (CDR2) and 97-114 (CDR3) of SEQ ID NO:32 and the light chain variable domain comprises amino acids 27-30 (CDR1), 48-50 (CDR2) and 87-91 (CDR3) of SEQ ID NO: 7;

[0722] (n) the heavy chain variable domain comprises amino acids 26-33 (CDR1), 51-58 (CDR2) and 97-114 (CDR3) of SEQ ID NO: 32 and the light chain variable domain comprises amino acids 27-30 (CDR1), 48-50 (CDR2) and 87-91 (CDR3) of SEQ ID NO: 8;

[0723] (o) the heavy chain variable domain comprises amino acids 26-33 (CDR1), 51-58 (CDR2) and 97-114 (CDR3) of SEQ ID NO: 32 and the light chain variable domain comprises amino acids 27-30 (CDR1), 48-50 (CDR2) and 87-91 (CDR3) of SEQ ID NO: 27;

[0724] (p) the heavy chain variable domain comprises amino acids 26-33 (CDR1), 51-58 (CDR2) and 97-114 (CDR3) of SEQ ID NO: 33, and the light chain variable domain comprises amino acids 27-30 (CDR1), 48-50 (CDR2) and 87-91 (CDR3) of SEQ ID NO: 6;

[0725] (q) the heavy chain variable domain comprises amino acids 26-33 (CDR1), 51-58 (CDR2) and 97-114 (CDR3) of SEQ ID NO: 33 and the light chain variable domain comprises amino acids 27-30 (CDR1), 48-50 (CDR2) and 87-91 (CDR3) of SEQ ID NO: 9;

[0726] (r) the heavy chain variable domain comprises amino acids 26-33 (CDR1), 51-58 (CDR2) and 97-114 (CDR3) of SEQ ID NO:33 and the light chain variable domain comprises amino acids 27-30 (CDR1), 48-50 (CDR2) and 87-91 (CDR3) of SEQ ID NO: 7;

[0727] (s) the heavy chain variable domain comprises amino acids 26-33 (CDR1), 51-58 (CDR2) and 97-114 (CDR3) of SEQ ID NO: 33 and the light chain variable domain comprises amino acids 27-30 (CDR1), 48-50 (CDR2) and 87-91 (CDR3) of SEQ ID NO: 8;

[0728] (t) the heavy chain variable domain comprises amino acids 26-33 (CDR1), 51-58 (CDR2) and 97-114 (CDR3) of SEQ ID NO: 33 and the light chain variable domain comprises amino acids 27-30 (CDR1), 48-50 (CDR2) and 87-91 (CDR3) of SEQ ID NO: 27;

[0729] (v) the heavy chain variable domain comprises amino acids 26-33 (CDR1), 51-58 (CDR2) and 97-114 (CDR3) of SEQ ID NO: 34, and the light chain variable domain comprises amino acids 27-30 (CDR1), 48-50 (CDR2) and 87-91 (CDR3) of SEQ ID NO: 6;

[0730] (w) the heavy chain variable domain comprises amino acids 26-33 (CDR1), 51-58 (CDR2) and 97-114 (CDR3) of SEQ ID NO: 34 and the light chain variable domain comprises amino acids 27-30 (CDR1), 48-50 (CDR2) and 87-91 (CDR3) of SEQ ID NO: 9;

[0731] (x) the heavy chain variable domain comprises amino acids 26-33 (CDR1), 51-58 (CDR2) and 97-114 (CDR3) of SEQ ID NO:34 and the light chain variable domain comprises amino acids 27-30 (CDR1), 48-50 (CDR2) and 87-91 (CDR3) of SEQ ID NO: 7;

[0732] (y) the heavy chain variable domain comprises amino acids 26-33 (CDR1), 51-58 (CDR2) and 97-114 (CDR3) of SEQ ID NO: 34 and the light chain variable domain comprises amino acids 27-30 (CDR1), 48-50 (CDR2) and 87-91 (CDR3) of SEQ ID NO: 8;

[0733] (z) the heavy chain variable domain comprises amino acids 26-33 (CDR1), 51-58 (CDR2) and 97-114 (CDR3) of SEQ ID NO: 34 and the light chain variable domain comprises amino acids 27-30 (CDR1), 48-50 (CDR2) and 87-91 (CDR3) of SEQ ID NO: 27;

[0734] (aa) the heavy chain variable domain comprises amino acids 26-33 (CDR1), 51-58 (CDR2) and 97-114 (CDR3) of SEQ ID NO: 35, and the light chain variable domain comprises amino acids 27-30 (CDR1), 48-50 (CDR2) and 87-91 (CDR3) of SEQ ID NO: 6;

[0735] (bb) the heavy chain variable domain comprises amino acids 26-33 (CDR1), 51-58 (CDR2) and 97-114 (CDR3) of SEQ ID NO: 35 and the light chain variable domain comprises amino acids 27-30 (CDR1), 48-50 (CDR2) and 87-91 (CDR3) of SEQ ID NO: 9;

[0736] (cc) the heavy chain variable domain comprises amino acids 26-33 (CDR1), 51-58 (CDR2) and 97-114 (CDR3) of SEQ ID NO:35 and the light chain variable domain comprises amino acids 27-30 (CDR1), 48-50 (CDR2) and 87-91 (CDR3) of SEQ ID NO: 7;

[0737] (dd) the heavy chain variable domain comprises amino acids 26-33 (CDR1), 51-58 (CDR2) and 97-114 (CDR3) of SEQ ID NO: 35 and the light chain variable domain comprises amino acids 27-30 (CDR1), 48-50 (CDR2) and 87-91 (CDR3) of SEQ ID NO: 8;

[0738] (ee) the heavy chain variable domain comprises amino acids 26-33 (CDR1), 51-58 (CDR2) and 97-114 (CDR3) of SEQ ID NO: 35 and the light chain variable domain comprises amino acids 27-30 (CDR1), 48-50 (CDR2) and 87-91 (CDR3) of SEQ ID NO: 27;

[0739] (ff) the heavy chain variable domain comprises amino acids 26-33 (CDR1), 51-58 (CDR2) and 97-114 (CDR3) of SEQ ID NO: 36, and the light chain variable domain comprises amino acids 27-30 (CDR1), 48-50 (CDR2) and 87-91 (CDR3) of SEQ ID NO: 6;

[0740] (gg) the heavy chain variable domain comprises amino acids 26-33 (CDR1), 51-58 (CDR2) and 97-114 (CDR3) of SEQ ID NO: 36 and the light chain variable domain comprises amino acids 27-30 (CDR1), 48-50 (CDR2) and 87-91 (CDR3) of SEQ ID NO: 9;

[0741] (hh) the heavy chain variable domain comprises amino acids 26-33 (CDR1), 51-58 (CDR2) and 97-114 (CDR3) of SEQ ID NO:36 and the light chain variable domain comprises amino acids 27-30 (CDR1), 48-50 (CDR2) and 87-91 (CDR3) of SEQ ID NO: 7;

[0742] (ii) the heavy chain variable domain comprises amino acids 26-33 (CDR1), 51-58 (CDR2) and 97-114 (CDR3) of SEQ ID NO: 36 and the light chain variable domain comprises amino acids 27-30 (CDR1), 48-50 (CDR2) and 87-91 (CDR3) of SEQ ID NO: 8; or

[0743] (jj) the heavy chain variable domain comprises amino acids 26-33 (CDR1), 51-58 (CDR2) and 97-114 (CDR3) of SEQ ID NO: 37 and the light chain variable domain comprises amino acids 27-30 (CDR1), 48-50 (CDR2) and 87-91 (CDR3) of SEQ ID NO: 27.

[0744] Clause 27. The isolated monoclonal antibody of any one of clauses 7-9 or 22, wherein the isolated monoclonal antibody has reduced autoreactivity as compared to a monoclonal antibody that includes a heavy chain variable domain that comprises amino acids 26-33 (CDR1), 51-58 (CDR2) and/or 97-114 (CDR3) of SEQ ID NO: 2, and includes a light chain variable domain comprising amino acids 27-30 (CDR1), 48-50 (CDR2) and/or 87-91 (CDR3) of SEQ ID NO: 6, wherein an antibody that includes the heavy chain variable domain specifically binds gp120 of HIV-1, and wherein the antibody is neutralizing

[0745] Clause 28. The isolated monoclonal antibody of clauses 10-12, wherein

[0746] (a) the heavy chain variable domain comprises amino acids 26-33 (CDR1), 51-58 (CDR2) and 97-114 (CDR3) of SEQ ID NO: 38, and the light chain variable domain comprises amino acids 27-30 (CDR1), 48-50 (CDR2) and 87-91 (CDR3) of SEQ ID NO: 6;

[0747] (b) the heavy chain variable domain comprises amino acids 26-33 (CDR1), 51-58 (CDR2) and 97-114 (CDR3) of SEQ ID NO: 38 and the light chain variable domain comprises amino acids 27-30 (CDR1), 48-50 (CDR2) and 87-91 (CDR3) of SEQ ID NO: 9;

[0748] (c) the heavy chain variable domain comprises amino acids 26-33 (CDR1), 51-58 (CDR2) and 97-114 (CDR3) of SEQ ID NO:38 and the light chain variable domain comprises amino acids 27-30 (CDR1), 48-50 (CDR2) and 87-91 (CDR3) of SEQ ID NO: 7;

[0749] (d) the heavy chain variable domain comprises amino acids 26-33 (CDR1), 51-58 (CDR2) and 97-114 (CDR3) of SEQ ID NO: 38 and the light chain variable domain comprises amino acids 27-30 (CDR1), 48-50 (CDR2) and 87-91 (CDR3) of SEQ ID NO: 8;

[0750] (e) the heavy chain variable domain comprises amino acids 26-33 (CDR1), 51-58 (CDR2) and 97-114 (CDR3) of SEQ ID NO: 38 and the light chain variable domain comprises amino acids 27-30 (CDR1), 48-50 (CDR2) and 87-91 (CDR3) of SEQ ID NO: 27;

[0751] (f) the heavy chain variable domain comprises amino acids 26-33 (CDR1), 51-58 (CDR2) and 97-114 (CDR3) of SEQ ID NO: 39, and the light chain variable domain comprises amino acids 27-30 (CDR1), 48-50 (CDR2) and 87-91 (CDR3) of SEQ ID NO: 6;

[0752] (g) the heavy chain variable domain comprises amino acids 26-33 (CDR1), 51-58 (CDR2) and 97-114 (CDR3) of SEQ ID NO: 39 and the light chain variable domain comprises amino acids 27-30 (CDR1), 48-50 (CDR2) and 87-91 (CDR3) of SEQ ID NO: 9;

[0753] (h) the heavy chain variable domain comprises amino acids 26-33 (CDR1), 51-58 (CDR2) and 97-114 (CDR3) of SEQ ID NO: 39 and the light chain variable domain comprises amino acids 27-30 (CDR1), 48-50 (CDR2) and 87-91 (CDR3) of SEQ ID NO: 7;

[0754] (i) the heavy chain variable domain comprises amino acids 26-33 (CDR1), 51-58 (CDR2) and 97-114 (CDR3) of SEQ ID NO: 39 and the light chain variable domain comprises amino acids 27-30 (CDR1), 48-50 (CDR2) and 87-91 (CDR3) of SEQ ID NO: 8;

[0755] (j) the heavy chain variable domain comprises amino acids 26-33 (CDR1), 51-58 (CDR2) and 97-114 (CDR3) of SEQ ID NO: 39 and the light chain variable domain comprises amino acids 27-30 (CDR1), 48-50 (CDR2) and 87-91 (CDR3) of SEQ ID NO: 27;

[0756] Clause 29. An isolated monoclonal antibody, comprising a heavy chain variable domain and a light chain variable domain, wherein the heavy chain variable domain of the antibody comprises amino acids 26-33 (CDR1), 51-58 (CDR2) and/or 97-114 (CDR3) of SEQ ID NO: 40, wherein the antibody specifically binds gp120 of HIV-1, and wherein the antibody is neutralizing

[0757] Clause 30. The isolated human monoclonal antibody of claim 3, wherein the heavy chain domain of the antibody comprises amino acids 26-33 (CDR1), 51-58 (CDR2) and 97-114 (CDR3) of SEQ ID NO: 40.

[0758] Clause 31. The isolated monoclonal antibody of claim 1, wherein the heavy chain variable domain comprises one of:

[0759] (a) amino acids 26-33 (CDR1), 51-58 (CDR2) and/or 97-114 (CDR3) of SEQ ID NO: 40, wherein X₁ is I, X₂ is H, X₃ is S and X₄ is T; or

[0760] (b) amino acids 26-33 (CDR1), 51-58 (CDR2) and/or 97-114 (CDR3) of SEQ ID NO: 40, wherein X₁ is I, X₂ is H, X₃ is N and X₄ is T.

[0761] Clause 32. The isolated monoclonal antibody of claim 1, wherein the heavy chain variable domain comprises one of:

[0762] (a) amino acids 26-33 (CDR1), 51-58 (CDR2) and 97-114 (CDR3) of SEQ ID NO: 40, wherein X₁ is I, X₂ is H, X₃ is S and X₄ is T; or

[0763] (b) amino acids 26-33 (CDR1), 51-58 (CDR2) and 97-114 (CDR3) of SEQ ID NO: 40, wherein X₁ is I, X₂ is H, X₃ is N and X₄ is T.

[0764] Clause 33. The isolated monoclonal antibody of any one of claims 1-4, wherein the heavy chain variable domain of the antibody comprises SEQ ID NO: 40.

[0765] Clause 34. The isolated monoclonal antibody of any one of claims 1-5, wherein the heavy chain variable domain of the antibody comprises one of:

[0766] (a) SEQ ID NO: 40, wherein X₁ is I, X₂ is H, X₃ is S and X₄ is T;

[0767] (b) SEQ ID NO: 40, wherein X₁ is I, X₂ is H, X₃ is N and X₄ is T;

[0768] (c) SEQ ID NO: 40, wherein X₁ is V, X₂ is H, X₃ is S and X₄ is A; or

[0769] (d) SEQ ID NO: 40, wherein X₁ is V, X₂ is H, X₃ is N and X₄ is A.

[0770] Clause 35. The isolated monoclonal antibody of any one of claims 1-18, wherein the light chain variable domain of the antibody comprises amino acids 27-30 (CDR1), 48-50 (CDR2) and 87-91 (CDR3) of SEQ ID NO: 41, wherein X₁ is E or no amino acid, X₂ is I or no amino acid, wherein X₃ is T or I, X₄ is W or S, X₅ is N or T, X₆ is V or Q, and X₇ is I or N.

[0771] Clause 36. The isolated monoclonal antibody of any one of claims 1-7, wherein the light chain variable domain of the antibody comprises one of:

[0772] (a) SEQ ID NO: 41, wherein X₁ is E, X₂ is I, X₃ is I, X₄ is W, X₅ is N, X₆ is V, and X₇ is I

[0773] (b) SEQ ID NO: 41, wherein X₁ is no amino acid, X₂ is no amino acid, X₃ is I, X₄ is W, X₅ is N, X₆ is V, and X₇ is I

[0774] (c) SEQ ID NO: 41, wherein X₁ is no amino acid, X₂ is no amino acid, X₃ is I, X₄ is W, X₅ is T, X₆ is V, and X₇ is I;

[0775] (d) SEQ ID NO: 41, wherein X₁ is E, X₂ is I, X₃ is T, X₄ is 5, X₅ is T, X₆ is Q, and X₇ is N;

[0776] (e) SEQ ID NO: 41, wherein X₁ is E, X₂ is no amino acid, X₃ is T, X₄ is 5, X₅ is T, X₆ is Q, and X₇ is N;

[0777] (f) SEQ ID NO: 42;

[0778] (g) SEQ ID NO: 43; or

[0779] (h) SEQ ID NO: 44.

[0780] Clause 37. The isolated monoclonal antibody of any of clauses 1-36, wherein the antibody is an IgG, IgM or IgA.

[0781] Clause 38. The isolated monoclonal antibody of any one of clauses 1-36, wherein the antibody is human.

[0782] Clause 39. An isolated antigen binding fragment of the isolated monoclonal antibody of any of clauses 1-38.

[0783] Clause 40. The isolated antigen binding fragment of clause 39, wherein the fragment is a Fab fragment, a Fab′ fragment, a F(ab)′₂ fragment, a single chain Fv protein (scFv), or a disulfide stabilized Fv protein (dsFv).

[0784] Clause 41. The isolated antigen binding fragment of clause 40, wherein the antigen binding fragment is a Fab or an scFv fragment.

[0785] Clause 42. The isolated monoclonal antibody of any of clauses 1-41, or an antigen binding fragment thereof, wherein the antibody or antigen binding fragment is labeled.

[0786] Clause 43. The isolated monoclonal antibody or antigen binding fragment of clause 42, wherein the label is a fluorescent, enzymatic, or radioactive label.

[0787] Clause 44. A composition comprising a therapeutically effective amount of the antibody of clauses 1-38, or an antigen binding fragment thereof, and a pharmaceutically acceptable carrier.

[0788] Clause 45. An isolated nucleic acid molecule encoding the monoclonal antibody of any of clauses 1-38 or encoding an antigen binding fragment of the monoclonal antibody.

[0789] Clause 46. The isolated nucleic acid molecule of clause 32, comprising a nucleic acid sequence set forth as SEQ ID NO: 11-16 or 37, a nucleic acid sequence set forth in Table 2 or Table 3, or a portion thereof.

[0790] Clause 47. The isolated nucleic acid molecule of one of clause 45 or clause 46, operably linked to a promoter.

[0791] Clause 48. An expression vector comprising the isolated nucleic acid molecule of any one of clauses 45-47.

[0792] Clause 49. An isolated host cell transformed with the nucleic acid molecule or vector of any one of clauses 45-48.

[0793] Clause 50. A method of detecting a human immunodeficiency virus (HIV)-1 infection in a subject comprising:

[0794] contacting a biological sample from the subject with at least one isolated monoclonal antibody of clauses 1-37 or an antigen binding fragment thereof; and

[0795] detecting antibody bound to the sample,

[0796] wherein the presence of antibody bound to the sample indicates that the subject has an HIV-1 infection.

[0797] Clause 51. The method of clause 50, wherein the isolated human monoclonal antibody is directly labeled.

[0798] Clause 52. The method of clause 50 or 51, further comprising:

[0799] contacting the sample with a second antibody that specifically binds the isolated human monoclonal antibody; and

[0800] detecting the binding of the second antibody,

[0801] wherein an increase in binding of the second antibody to the sample as compared to binding of the second antibody to a control sample detects the presence of an HIV-1 infection the subject.

[0802] Clause 53. A method for preventing or treating an human immunodeficiency virus (HIV)-1 infection in a subject, comprising administering to the subject a therapeutically effective amount of at least one antibody of any one of clauses 1-38, an antigen binding fragment thereof, a nucleic acid encoding the antibody, and/or a nucleic acid encoding the antigen binding fragment, thereby preventing or treating the HIV-1 infection.

[0803] Clause 54. The method of clause 53, wherein the method is a method for treating an HIV-1 infection, and wherein the subject has acquired immune deficiency syndrome (AIDS).

[0804] Clause 55. The method of clause 53 or 54, further comprising administering to the subject an anti-viral agent.

[0805] Clause 56. The method of any one of clauses 53-55, further comprising measuring HIV-1 viral titer in the subject.

[0806] Clause 57. A composition comprising a therapeutically effective amount of the nucleic acid of clauses 44-47, or the vector of clause 48 and a pharmaceutically acceptable carrier.

[0807] The following examples are provided to illustrate certain particular features and/or embodiments. These examples should not be construed to limit the disclosure to the particular features or embodiments described.

### EXAMPLES

### Example 1

### Summary of Methods and Results

### 1. The Identification of VRC07.

[0808] VRC01 was cloned from patient 45, a treatment naïve slow progressor from North America. It was hypothesized that this patient's blood could contain related but more potent antibodies. To further explore the antibodyome, deep sequencing (454 pyrosequencing) was used to amplify and analyze the variable domains of both heavy and light chains of Immunoglobulin G (IgG). VRC07 heavy chain was identified, which appeared to be a clonal-relative of VRC01 but differed by 16 amino acids and contained a 4 amino acid insertion in the CDRH3. The natural light chain of VRC07 was not known, as heavy and light chains were sequenced en masse from peripheral blood mononuclear cells (PBMCs). Thus, VRC07 was tested paired with the VRC01 light chain. Initial neutralization screening showed VRC07 was more potent than VRC01 and was able to neutralize a number of VRC01-resistant strains. On a 181 virus screen that included a set of 18 VRC01 resistant viruses, VRC07 was able to neutralize 91% of viruses with an IC₅₀ less than 50 μg/ml and 72% of viruses with in IC₅₀ less than 1 μg/ml. VRC07 had a mean IC₅₀ of 0.11 μg/ml, a 2.8-fold improvement over its predecessor, and was able to neutralize a number of VRC01-resistant strains.

### 2. Rational Structure-Based Optimizations.

[0809] Initial Optimizations: Increasing Contact Area with Gp120.

[0810] Although VRC07 wildtype was highly potent and represented a significant increase above VRC01, studies were then performed to engineer VRC07 to have at least a 10-fold improvement in neutralization potential over VRC01. Biochemical and structure/function approaches were both used to improve VRC07.

[0811] Alanine screening of all gp120 contact residues revealed one clear hot spot: mutation of heavy chain Gly54 to Ala resulted in a 7-fold increase in binding to gp120. A large, hydrophobic or charged residue (Arg, Trp, Phe, Tyr) was substituted into position 54_{HC} in VRC07. All increased neutralization breadth and potency, and the Gly54_{HC}Trp mutation increased neutralization potency by 4.8 fold over VRC07 (˜13-fold increase over VRC01). Diskin et al. (Science 2011) found a Gly54_{HC}Trp mutation in a VRC01-related antibody (NIH4546) increased potency ˜10-fold. Replacing Gly with a larger, hydrophobic residue allows the CDRH2 of the antibody to enter into a cavity on gp120, increasing the overall contact area between the molecules and thus increasing the strength of the overall interaction.

[0812] For administration to humans, antibodies should not be auto-reactive (i.e., not bind to human antigens). A number of assays are available to test for auto-reactivity in vitro, including an ELISA-based anti-cardiolipin assay, a Luminex-based anti-nuclear antigen (ANA) assay, and an ANA cell-staining assay, which is considered the gold standard. Unfortunately, VRC07 Gly54_{HC}Trp proved to be highly auto-reactive in all three assays. In fact, all four tested G54_{HC} variants (Trp, Arg, Tyr, Phe) were highly auto-reactive, indicating that these were not preferred for human use, but could be used as diagnostics.

[0813] Additional Structure-Guided Heavy Chain Optimizations.

[0814] First, the structure of VRC07 in complex with gp120 was solved. The structures of VRC01, VRC07, and the biochemical data from alanine screening were used to identify key resides for experimental manipulation.

[0815] Because of the potential importance of position 54_{HC} in increasing contact area with gp120, it was decided to fully saturate this residue and test every possible amino acid substitution. Since it had been determined that a number of G54_{HC} resides were highly auto-reactive (see above), each resulting antibody was screened for auto-reactivity. A His at position 54 increased neutralization by ˜2.5 fold over VRC07 (˜7-fold over VRC01) and was not auto-reactive in initial analyses.

[0816] Position 58 in the heavy chain was also of interest. In initial analyses, mutation of Ser58_{HC} to Asn increased neutralization potential by 1.5 fold (˜4.2 over VRC01). In VRC01, VRC03, and NIH4546 (all clonal relatives of VRC01 and VRC07) residue 58_{HC} is an Asn, but in VRC07 position 58_{HC} is a Ser.

[0817] Light Chain Structure-Guided Optimizations:

[0818] N-terminal modifications. An alanine screen of the light chain gp120-contact residues showed that mutating Val3_{LC} to Ala resulted in a 4-fold increase in binding. Additionally, the solved crystal structures of VRC01 and VRC07 lacked resolution of the N-terminal most 2 residues (VRC01) or 1 residue (VRC07) of the light chain, suggesting these residues do not make critical contact within the antibody or with gp120. The NH₂-terminal domain of VRC01 light chain was modified, including deletions and Ala and Gly substitutions of amino acids #1_{LC}-4_{LC}. A two amino acid deletion resulted in an increased potency of ˜2.5-fold (˜7 fold increase over VRC01).

### 3. Additional Optimizations.

[0819] Germline reversions to reduce immunogenicity. VRC01, VRC07, and related antibodies are highly somatically mutated. It was determined that VRC07 could be reverted towards its germline while maintaining potency and breadth. Reducing somatic mutations may reduce the in vivo immunogenicity of the molecules. The somatic mutations were reduced by one half (44% to 22%) in the heavy chain and one third (29% to 19%) in the light chain and mature residues were iteratively added back. All back mutations were in the framework regions. Most germline reversions were able to maintain basic functions, such as gp120 binding, although they were not as potent and/or broad as the mature VRC07. Interestingly, three germline mutations were identified in the heavy chain (Arg3_{HC}Gln, Ile37_{HC}Val, Thr93_{HC}Ala) that increased potency by 1.2-fold (˜3.3 fold over VRC01). It is of note that Ser58_{HC}Asn, which increases potency by ˜1.5-fold, is also a germline reversion mutation.

[0820] Light/Heavy Interface Optimizations.

[0821] Strengthening the interactions between the light and heavy chains can increase the stability of the molecule, which may increase neutralization potency. Using rational structure-based design and bioinformatic approaches, four light chain mutants were designed to increase binding with the heavy chain. While these light chains increased neutralization potency, they were auto-reactive, and were not developed. This demonstrates that it is often not predictable which rational design and bioinformatics approaches will be successful.

[0822] Optimization of Solubility and Elimination of Glycans.

[0823] In addition to mutations designed solely to increase neutralization potential, parameters were optimized that affect large-scale protein production. Two areas were addressed: increasing solubility and decreasing glycans. Glycosylation leads to more heterogeneous products, which while not necessarily detrimental to production, does complicate purity analysis. Surprisingly, it was found that deleting the N-linked glycosylation site at position 72_{LC} (Asn72_{LC}Thr mutation) on the light chain increased potency 1.2-fold. The solubility mutant light chain (VRC01hpL02), which contained 4 mutated residues on solvent exposed surfaces (hydrophobic to hydrophilic mutations) and the same deletion of the N-linked glycosylation site at position 72_{LC}, also increased neutralization ˜1.2-fold (˜3.3 fold over VRC01).

[0824] Mutations to Increase Half-Life.

[0825] In order to optimize in vivo half-life, an LS mutation to was added to the FcRn receptor binding region (Zalevsky, et al., Nature Biotechnology 2010). This mutation has no effect on neutralization breadth or potency, but increases the half-life of the antibody by 2- to 3-fold in both humanized mice and non-human primates.

4. Combining mutations.

[0826] Over 200 engineered VRC07 variants have been tested. Most were analyzed for neutralization potential on panels of 6-12 viruses and a subset were tested for auto-reactivity. Based on these results, four heavy chains and five light chains were identified as being of specific interest. For the heavy chains, combinations of the Ser58_{HC}Asn mutation, two germline mutations (Ile37_{HC}Val and Thr93_{HC}Ala), and the Gly54_{HC}His mutation were identified. A combination of these mutations can increase potency up to 4.5-fold over the VRC07 wild type (˜12.5-fold over VRC01).

[0827] Additionally, mutations have been combined on the light chain, including combinations of the substitutions at position of Phe97_{LC}, solubility substitutions (VRC01hpL02, VRC01hpL03, VRC01hpL04, VRC01hpL05), VRC01hpL06) and glycan mutants (Asn72_{LC}Thr) with the N-terminal modifications (deletion of Glul_{LC}, Ile3_{LC}, substitution of Val3_{LC}). These mutations can contribute a 3-fold increase in potency (˜8.5-fold increase over VRC01).

[0828] A combination can yield see an increase of ˜5-fold over the parental VRC07, which is an increase of ˜15-fold over VRC01. The VRC07 heavy chains are:

1. VRCO7 G54H:
(SEQ ID NO: 32)
QVRLSQSGGQMKKPGDSMRISCRASGYEFINCPINWIRLAPGKRPEWMGW
MKPRHGAVSYARQLQGRVTMTRDMYSETAFLELRSLTSDDTAVYFCTRGK
YCTARDYYNWDFEHWGQGTPVTVSS
2. VRC07 G54H, S58N:
(SEQ ID NO: 258)
QVRLSQSGGQMKKPGDSMRISCRASGYEFINCPINWIRLAPGKRPEWMGW
MKPRHGAVNYARQLQGRVTMTRDMYSETAFLELRSLTSDDTAVYFCTRGK
YCTARDYYNWDFEHWGQGTPVTVSS
3. VRC07 I37V, G54H, T93A:
(SEQ ID NO: 259)
QVRLSQSGGQMKKPGDSMRISCRASGYEFINCPINWVRLAPGKRPEWMGW
MKPRHGAVSYARQLQGRVTMTRDMYSETAFLELRSLTSDDTAVYFCARGK
YCTARDYYNWDFEHWGQGTPVTVSS
4. VRC07 I37V, G54H, S58N, T93A:
(SEQ ID NO: 260)
QVRLSQSGGQMKKPGDSMRISCRASGYEFINCPINWVRLAPGKRPEWMGW
MKPRHGAVNYARQLQGRVTMTRDMYSETAFLELRSLTSDDTAVYFCARGK
YCTARDYYNWDFEHWGQGTPVTVSS

The light chain variable domains for pairing with the VRC07 heavy chain include:

1. VRC01:
(SEQ ID NO: 9)
EIVLTQSPGTLSLSPGETAIISCRTSQYGSLAWYQQRPGQAPRLVIYSGS
TRAAGIPDRFSGSRWGPDYNLTISNLESGDFGVYYCQQYEFFGQGTKVQV
DIK
2. VRC01 E1/I2del V3E:
(SEQ ID NO: 219)
ELTQSPGTLSLSPGETAIISCRTSQYGSLAWYQQRPGQAPRLVIYSGSTR
AAGIPDRFSGSRWGPDYNLTISNLESGDFGVYYCQQYEFFGQGTKVQVDI
K
3. VRC01 E1/I2del V3K:
(SEQ ID NO: 220)
KLTQSPGTLSLSPGETAIISCRTSQYGSLAWYQQRPGQAPRLVIYSGSTR
AAGIPDRFSGSRWGPDYNLTISNLESGDFGVYYCQQYEFFGQGTKVQVDI
K
4. VRC01 E1/I2del V3S:
(SEQ ID NO: 221)
SLTQSPGTLSLSPGETAIISCRTSQYGSLAWYQQRPGQAPRLVIYSGSTR
AAGIPDRFSGSRWGPDYNLTISNLESGDFGVYYCQQYEFFGQGTKVQVDI
K
5. VRC01 E1/I2del F97D:
(SEQ ID NO: 222)
VLTQSPGTLSLSPGETAIISCRTSQYGSLAWYQQRPGQAPRLVIYSGSTR
AAGIPDRFSGSRWGPDYNLTISNLESGDFGVYYCQQYEDFGQGTKVQVDI
K
6. VRC01 E1/I2del F97K:
(SEQ ID NO: 223)
VLTQSPGTLSLSPGETAIISCRTSQYGSLAWYQQRPGQAPRLVIYSGSTR
AAGIPDRFSGSRWGPDYNLTISNLESGDFGVYYCQQYEKFGQGTKVQVDI
K
7. VRC01 E1/I2del F97S:
(SEQ ID NO: 224)
VLTQSPGTLSLSPGETAIISCRTSQYGSLAWYQQRPGQAPRLVIYSGSTR
AAGIPDRFSGSRWGPDYNLTISNLESGDFGVYYCQQYESFGQGTKVQVDI
K
8. VRC01 E1/I2del F97H:
(SEQ ID NO: 225)
VLTQSPGTLSLSPGETAIISCRTSQYGSLAWYQQRPGQAPRLVIYSGSTR
AAGIPDRFSGSRWGPDYNLTISNLESGDFGVYYCQQYEHFGQGTKVQVDI
K
9. VRC01 E1/I2del V3E, F97S:
(SEQ ID NO: 226)
ELTQSPGTLSLSPGETAIISCRTSQYGSLAWYQQRPGQAPRLVIYSGSTR
AAGIPDRFSGSRWGPDYNLTISNLESGDFGVYYCQQYESFGQGTKVQVDI
K
10. VRC01 E1/I2del V3E, F97H:
(SEQ ID NO: 227)
ELTQSPGTLSLSPGETAIISCRTSQYGSLAWYQQRPGQAPRLVIYSGSTR
AAGIPDRFSGSRWGPDYNLTISNLESGDFGVYYCQQYEHFGQGTKVQVDI
K
11. VRC01hpL03:
(SEQ ID NO: 228)
EIVLTQSPGTLSLSPGETAIISCRTSQYGSLAWYQQRPGQAPRLVIYSGS
TRAAGIPDRFSGSRSGPDYTLTISNLESGDFGVYYCQQYEFFGQGTKVQV
DIK
12. VRC01hpL04:
(SEQ ID NO: 229)
EIVLTQSPGTLSLSPGETAQISCRTSQYGSLAWYQQRPGQAPRLVIYSGS
TRAAGIPDRFSGSRNGPDYTLTISNLESGDFGVYYCQQYEFFGQGTKVQV
DIK
13. VRC01hpL05:
(SEQ ID NO: 230)
EIVLTQSPGTLSLSPGETAQISCRTSQYGSLAWYQQRPGQAPRLVIYSGS
TRAAGIPDRFSGSRNGPDYTLTISNLESGDFGVYYCQQYEFFGQGTKVQQ
DNK
14. VRC01hpL06:
(SEQ ID NO: 231)
EIVLTQSPGTLSLSPGETAEISCRTSQYGSLAWYQQRPGQAPRLVIYSGS
TRAAGIPDRFKGEREGPEYRLRISNLESGDFGVYYCQQYEFFGQGTKVQQ
DNK
15. VRC01hpL02 E1/I2-deletion, V3S:
(SEQ ID NO: 232)
SLTQSPGTLSLSPGETATISCRTSQYGSLAWYQQRPGQAPRLVIYSGSTR
AAGIPDRFSGSRSGPDYTLTISNLESGDFGVYYCQQYEFFGQGTKVQQDN
K
16. VRC01LhpL03 E1/I2-deletion, V3S:
(SEQ ID NO: 233)
SLTQSPGTLSLSPGETAIISCRTSQYGSLAWYQQRPGQAPRLVIYSGSTR
AAGIPDRFSGSRSGPDYTLTISNLESGDFGVYYCQQYEFFGQGTKVQVDI
K
17. VRC01LhpL04 E1/I2-deletion, V3S:
(SEQ ID NO: 234)
SLTQSPGTLSLSPGETAQISCRTSQYGSLAWYQQRPGQAPRLVIYSGSTR
AAGIPDRFSGSRNGPDYTLTISNLESGDFGVYYCQQYEFFGQGTKVQVDI
K
18. VRC01LhpL05 E1/12 deletion, V3S:
(SEQ ID NO: 235)
SLTQSPGTLSLSPGETAQISCRTSQYGSLAWYQQRPGQAPRLVIYSGSTR
AAGIPDRFSGSRNGPDYTLTISNLESGDFGVYYCQQYEFFGQGTKVQQDN
K
19. VRC01LhpL06 E1/I2-deletion, V3S:
(SEQ ID NO: 236)
SLTQSPGTLSLSPGETAEISCRTSQYGSLAWYQQRPGQAPRLVIYSGSTR
AAGIPDRFKGEREGPEYRLRISNLESGDFGVYYCQQYEFFGQGTKVQQDN
K
20. VRC01LhpL04 E1/I2-deletion, V3E:
(SEQ ID NO: 237)
ELTQSPGTLSLSPGETAQISCRTSQYGSLAWYQQRPGQAPRLVIYSGSTR
AAGIPDRFSGSRNGPDYTLTISNLESGDFGVYYCQQYEFFGQGTKVQVDI
K
21. VRC01 E1/12 deletion:
(SEQ ID NO: 53)
VLTQSPGTLSLSPGETAIISCRTSQYGSLAWYQQRPGQAPRLVIYSGSTR
AAGIPDRFSGSRWGPDYNLTISNLESGDFGVYYCQQYEFFGQGTKVQVDI
K
22. VRC01hpL02:
(SEQ ID NO: 50)
EIVLTQSPGTLSLSPGETATISCRTSQYGSLAWYQQRPGQAPRLVIYSGS
TRAAGIPDRFSGSRSGPDYTLTISNLESGDFGVYYCQQYEFFGQGTKVQQ
DNK

[0829] Thus, rational, structure/function-based designs were used to engineer antibodies that are 10-fold more potent than VRC01. A combination of binding mutations and germline reversions increases heavy chain potency, such as by up to 4.5-fold over VRC07. NH₂-terminal modifications coupled with glycan deletions and solubility mutations increase light chain potency by 3-fold over VRC07. Since VRC07 is 2.8 fold more potent than VRC01, this can result in more than a 10-fold threshold for an increase over VRC01 potency (a 38-fold calculated).

[0830] Many manipulations of antibodies result in auto-reactivity. In general, it was found that many of the most potent modifications including Gly54_{HC}Trp and light-heavy interface mutations result in auto-reactivity. There is no established method to predict auto-reactivity by bioinformatics, so auto-reactivity must be determined empirically. An antibody with increased auto-reactivity can be used in diagnostic assays, but likely will not be used as a therapeutic.

[0831] All antibodies can be tested in three auto-reactivity assays early in development. The predicted increases in potency discussed above include mutations shown not to be auto-reactive. The disclosed antibodies can be used in combination with other antibodies, in order to increase potency and breadth, hence efficacy, while minimizing the possibility of virus escape.

### Example 2

### Identification of Human Monoclonal HIV-1 Gp120 Specific Neutralizing Antibodies

[0832] The following methods were used to isolate VRC07, VRC07b, and VRC07c human monoclonal antibodies (See FIGS. 1-5). The heavy chain of the VRC07 antibody and the heavy and light chains of the VRC07b and VRC07c antibodies were isolated.

[0833] As described in the following methods, the potency and breadth of neutralization of the VRC07 antibody (VRC07 heavy chain (SEQ ID NO: 2) paired with VRC01 light chain (SEQ ID NO: 9) and a IgG constant domain) was assessed on a comprehensive panel of Env pseudoviruses (see FIGS. 6 and 7). These 190 viral strains represented all major circulating HIV-1 genetic subtypes (clades) and included viruses derived from acute and chronic stages of HIV-1 infection. As shown in FIG. 7, VRC07 neutralized 92% of these pseudoviruses with a geometric mean IC50 value of 0.114 μg/ml.

### Materials and Methods

[0834] Human Specimens.

[0835] Peripheral blood mononuclear cells (PBMCs) of donor 45, from whom monoclonal antibodies (mAbs) VRC01, VRC02, VRC03 were isolated, were infected with an HIV-1 Glade B virus. The donor has been HIV-1 infected with a Glade B virus for more than 15 years and is a slow progressor with CD4 T-cell counts over 500 cells/μl, plasma HIV-1 RNA values less than 15,000 copies/ml. He has been chronically infected and had not initiated antiretroviral treatment at the time of PBMC sampling. All human samples were collected with informed consent under clinical protocols approved by the appropriate institutional review board (IRB).

[0836] Sample Preparation for 454 Pyrosequencing.

[0837] Briefly, mRNA was extracted from 20 million PBMC into 200 μl of elution buffer (Oligotex kit, Qiagen), then concentrated to 10-30 μl by centrifuging the elution through a 30 kD micron filter (Millipore). The reverse-transcription was performed in one or multiple 35 μl-reactions, each composed of 13 μl of mRNA, 3 μl of oligo(dT)₁₋₂-18 (SEQ ID NO: 49) at 0.5 μg/μl (Invitrogen), 7 μl of 5× first strand buffer (Invitrogen), 3 μl of RNase Out (Invitrogen), 3 μl of 0.1M DTT, 3 μl of dNTP mix, each at 10 mM, and 3 μl of SuperScript II (Invitrogen). The reactions were incubated at 42° C. for 2 hours. The cDNAs from each sample were combined, cleaned up and eluted in 20 μl of elution buffer (NucleoSpin Extract II kit, Clontech). In this way, 1 μl cDNA was roughly equivalent of transcripts from 1 million PBMC. The immunoglobulin gene-specific PCRs were set up using 5 μl cDNA as template (equivalent of transcripts from 5 million PBMC), using the Platinum Taq DNA Polymerase High Fidelity system (Invitrogen) in a total volume of 50 μl. The reaction mix was composed of water, 5 μl of 10× buffer, 2 μl of dNTP mix, each at 10 mM, 2 μl of MgSO₄ at 25 μM, 1 μl of each primer at 25 μM, and 1 μA of platinum Taq DNA polymerase high fidelity. The forward primers for VH1 gene amplification were 5′L-VH1, 5′ACAGGTGCCCACTCCCAGGTGCAG3′ (SEQ ID NO: 17); 5′L-VH1#2, 5′ GCAGCCACAGGTGCCCACTCC3′ (SEQ ID NO: 18); 5′L-VH1-24, 5′CAGCAGCTACAGGCACCCACGC3′ (SEQ ID NO: 19); 5′L-VH1-69, 5′ GGCAGCAGCTACAGGTGTCCAGTCC3′ (SEQ ID NO: 20); the reverse primers were 3′Cγ-CH1, 5′ GGGGGAAGACCGATGGGCCCTTGGTGG3′ (SEQ ID NO: 21), and 3′ Cμ-CH1, 5′ GGGAATTCTCACAGGAGACGA3′ (SEQ ID NO: 22). The PCR was initiated at 95° C. for 2 min, followed by 25 cycles of 95° C. for 30 sec, 58° C. for 30 sec, and 72° C. for 1 min, followed by 72° C. for 10 min. The PCR products at the expected size (450-500 bp) were gel purified (Qiagen), followed by phenol/chloroform extraction.

[0838] 454 Library Preparation and Pyrosequencing.

[0839] PCR products were quantified using Qubit™ (Life Technologies, Carlsbad, Calif.). Following end repair 454 adapters were added by ligation. Library concentrations were determined using the KAPA Biosystems qPCR system (Woburn, Mass.) with 454 standards provided in the KAPA system. 454 pyrosequencing of the PCR products was performed on a GS FLX sequencing instrument (Roche-454 Life Sciences, Bradford, Conn.) using the manufacturer's suggested methods and reagents. Initial image collection was performed on the GS FLX instrument and subsequent signal processing, quality filtering, and generation of nucleotide sequence and quality scores were performed on an off-instrument linux cluster using 454 application software (version 2.5.3). The amplicon quality filtering parameters were adjusted based on the manufacturer's recommendations (Roche-454 Life Sciences Application Brief No. 001-2010). Quality scores were assigned to each nucleotide using methodologies incorporated into the 454 application software to convert flowgram intensity values to Phred-based quality scores. The quality of each run was assessed by analysis of internal control sequences included in the 454 sequencing reagents. Reports were generated for each region of the PicoTiterPlate (PTP) for both the internal controls and the samples.

[0840] Bioinformatics Analysis of 454-Pyrosequencing-Determined Antibodyomes.

[0841] A general bioinformatics pipeline has been developed to process and analyze 454 pyrosequencing-determined antibodyomes. The information generated in each step of the process was used to characterize the basic features of antibodyomes as well as to identify potential neutralizing antibody sequences for functional validation. Specifically, each sequence read was (1) reformatted and labeled with a unique index number; (2) assigned to variable (V) gene family and allele using IgBLAST, and sequences with E-value >10⁻³ were rejected; (3) compared with the germline V-gene and known VRC01-like antibodies using nucleotide sequences and a global alignment module implemented in CLUSTALW2, which provides the basis for identity/divergence-grid analysis (VRC07 heavy chain sequence was identified from the identity/divergence plot); (4) subjected to a template-based error correction scheme where 454 homopolymer errors in V gene were detected and corrected based on the alignment to germline sequence; (5) translated to amino acid sequence, which was further compared with known VRC01-like antibodies; (6) filtered using characteristic sequence motifs in variable domain sequence such as QVQ (or other possible triplets) at the N-terminus, CAR (or other possible triplets) at the end of V region, WGXG at the end of CDR H3, and VSS (or other possible triplets) at the C-terminus of variable domain. As an optional step, the structural compatibility of a 454-pyrosequencing-derived heavy- or light-chain sequence with known VRC01-like antibody/gp120 complex structures can be evaluated by threading.

[0842] Isolation of Antigen-Specific Memory B Cells by Fluorescence Activated Cell Sorting (FACS).

[0843] The Avi-tagged RSC3 and RSC3 were expressed, purified, and biotinylated using the biotin ligase Bir A (Avidity, Denver, Colo.). The proteins were then conjugated with the streptavidin-fluorochrome reagents, streptavidin-allophycocyanin (SA-APC) (Invitrogen) for RSC3 and streptavidin-phycoerythrin (SA-PE) (Sigma) for ΔRSC3. About 20 million donor PBMC were stained with RSC3-APC, ΔRSC3-PE, and an antibody cocktail consisting of anti-CD3-APC-Cγ7 (BD Pharmingen), CD8-Qdot705 (VRC), CD19-Qdot585 (VRC), CD2O-Pacific Blue (VRC), CD27-APC-AlexaFluor700 (Beckman Coulter), CD14-Qdot800 (VRC), IgG-FITC (BD Pharmingen) and IgM-PE-Cγ5 (BD Pharmingen). In addition, aqua blue (Invitrogen) was used to exclude dead cells. The stained PBMC were washed with PBS, then analyzed and sorted using a modified 3-laser FACSAria cell sorter using the FACSDiva software (BD Biosciences). Single cells with the phenotype of CD3−, CD8−, aqua blue−, CD14−, CD19+, CD20+, IgG+, IgM−, RSC3+ and ΔRSC3− were sorted into 96-well PCR plates containing 20 μl of lysis buffer per well. The lysis buffer contained 0.5 μl of RNase Out (Invitrogen), 5 μl of 5× first strand buffer (Invitrogen), 1.25 μl of 0.1M DTT (Invitrogen) and 0.0625 μl of Igepal (Sigma). The PCR plates with sorted cells were stored at −80° C. The total content of the donor PBMC sample passing through the sorter was saved in FCS files for further analysis with FlowJo software (TreeStar, Cupertino, Calif.). The VRC07b and VRC07c antibodies were isolated using the RSC3+single B cell sort.

[0844] Single B-Cell Immunoglobulin Gene Amplification and Cloning.

[0845] The frozen plates with single B-cell RNA were thawed at room temperature, and the reverse-transcription was carried out by adding 3 μl of random hexamers (Gene Link, Hawthorne, N.Y.) at 150 ng/μl, 2 μl of dNTP mix, each at 10 mM, and 1 μl of SuperScript 111 (Invitrogen) into each well. The thermocycle for reverse-transcription was 42° C. for 10 min, 25° C. for 10 min, 50° C. for 60 min and 94° C. for 5 min. The cDNA plates were stored at −20° C., and the IgH, IDκ and Igλ variable domain genes were amplified independently by nested PCR starting from 5 μl of cDNA as template. All PCRs were performed in 96-well PCR plates in a total volume of 50 μl containing water, 5 μl of 10× buffer, 1 μl of dNTP mix, each at 10 mM, 1 μl of MgCl₂ at 25 mM (Qiagen, Valencia, Calif.) for 1^{st} round PCR or 10 μl× Q-SOLUTION™ (Qiagen) for 2^{nd} round PCR, 1 μl of primer or primer mix for each direction at 25 μM, and 0.4 μl of HOTSTAR™ Taq DNA polymerase (Qiagen). Each round of PCR was initiated at 94° C. for 5 min, followed by 50 cycles of 94° C. for 30 sec, 58° C. for IgH and Igκ or 60° C. for Igλ for 30 sec, and 72° C. for 1 min, followed by 72° C. for 10 min. The positive 2^{nd} round PCR products were cherry-picked for direct sequencing with both forward and reverse PCR primers. PCR products that gave a productive IgH, Igκ or Igλ rearranged sequence were re-amplified from the 1^{st} round PCR using custom primers containing unique restriction digest sites and subsequently cloned into the corresponding Igγ1, Igκ and Igλ expression vectors. The full-length IgG1 was expressed by co-transfection of 293F cells with equal amount of the paired heavy and light chain plasmids, and purified using a recombinant protein-A column (GE Healthcare).

[0846] IgG Gene Family Analysis.

[0847] The IgG heavy and light chain nucleotide sequences of the variable domain were analyzed with the JOINSOLVER® analysis package (available from the National Institute of Allergy and Infectious Disease, Bethesda, Md.) and IMGT/V-Quest (INTERNATIONAL IMMUNOGENETICS INFORMATION SYSTEM®, Brochet, et al., Nucl. Acids Res., 36:W503-508, 2008)). The VRC mAb V_{K} gene use was determined by homology to germline genes in the major 2p11.2 IGK locus. The VRC mAb D gene use was determined by homology to genes in the major 14q32.33 IGH locus. A combination of consecutive matching length with a +1/−2.02 scoring algorithm in the context of the V to J distance was applied for determining IGHD alignments and VD and DJ junctions in mutated sequences. Immunoglobulin rearrangements were grouped into classes based upon the VDJ gene use, similarity of replacement and silent mutations and the CDR3 identity.

[0848] Antibody Expression and Purification.

[0849] Genes encoding the heavy and light chain of the VRC07b and VRC07c and the VRC07 heavy chain were each synthesized and cloned (GeneImmune, Gaithersburg, Md.) into the CMV/R expression vector containing the constant regions of IgG1. The VRC07 heavy chain was paired with the VRC01 light chain. The VRC07b and VRC07c heavy chains were paired with the corresponding VRC07b or VRC07c light chains. Full-length IgGs were produced by transient transfection using 293fectin (Invitrogen, Carlsbad, Calif.) in 293F cells (Invitrogen) maintained in serum-free free-style medium (Invitrogen). Culture supernatants were harvested 5-6 days after transfection, filtered through a 0.22 μm filter, then followed by IgG1 purification using a recombinant protein-A column (GE Healthcare).

[0850] Neutralization Assays.

[0851] Neutralization assays were performed substantially as previously described (see, e.g., PCT Pub. No. WO2011/038290). Briefly, HIV-1 Env-pseudoviruses were prepared by transfecting 293T cells (6×10⁶ cells in 50 ml growth medium in a T-175 culture flask) with 10 μg of rev/env expression plasmid and 30 μg of an env-deficient HIV-1 backbone vector (pSG3ΔEnvelope), using Fugene 6 transfection reagents (Invitrogen). Pseudovirus-containing culture supernatants were harvested two days after transfection, filtered (0.45 μm), and stored at −80° C. or in the vapor 11 phase of liquid nitrogen. Neutralization was measured using HIV-1 Env-pseudoviruses to infect TZM-bl cells as described previously (see, e.g., PCT. Pub. No. WO2011/038290). Virus was incubated for 30 min at 37° C. with 10 μl of serial diluted antibody in duplicate wells of a 96-well flat bottom culture plate. To keep assay conditions constant, sham media was used in place of antibody in specified control wells. The virus input was set at a multiplicity of infection of approximately 0.01, which generally results in 100,000 to 400,000 relative light units (RLU) in a luciferase assay (Bright Glo, Promega, Madison, Wis.). The antibody concentrations were defined at the point of incubation with virus supernatant. Neutralization curves were fit by nonlinear regression using a 5-parameter hill slope equation. The 50% and 80% inhibitory concentrations (IC50 and IC80) were reported as the antibody concentrations required to inhibit infection by 50% and 80% respectively.

### Example 3

### Optimization of Gp120 Specific Monoclonal Antibodies

[0852] Structure-based analysis was used to identify modifications that increase the potency and breadth of VRC07 antibody (See FIG. 9). Crystal structure analysis of the VRC07 heavy chain complemented with the VRC01 light chain (VRC07H/VRC01L) was used to identify amino acid substitutions that potentially optimized gp120 affinity and neutralization (see FIG. 10). Based on this analysis, several amino acid substitutions were generated and tested for the VRC07 heavy chain, including G54L, G54F, G54R, G54W, and G54Y substitutions (referring to Kabat positioning; see FIG. 11). Double substitutions were also tested by additionally incorporating the I30Q, I30R or S58N substitutions (see FIG. 11). The modified VRC07 heavy chains were complemented with VRC01 light chain and new antibodies were expressed, purified, and tested for affinities to HIV-1 gp120 proteins by surface plasma resonance (FIG. 10) and ELISA (FIG. 12A-12B) assays. Additional ELISA assays were also performed to examine gp120 binding of several different VRC07 heavy chain modifications complemented with VRC01 or VRC07 light chains (see FIG. 13; sequence information for the proteins indicated in FIG. 13 can be found herein, See Tables 2 and 3). Among the tested modifications, VRC07H (G54W) with I30R, I30Q, or/and S58N mutations showed affinities at least comparable or better than that of VRC07H (G54W) alone. The ability of antibodies containing these particular VRC07H/VRC01L modifications to neutralize the panel of HIV-1 viruses was also tested (See FIG. 14). The ELISA and neutralization assays were performed as described in Example 1. These findings indicated that certain VRC07 heavy chain amino acid substitutions increase the potency and breadth of this monoclonal antibody against the panel of tested HIV-1 viruses.

### Example 4

### Gp120 Binding and HIV-1 Neutralization

[0853] A series of monoclonal antibodies was tested for binding to various gp120 isoforms as well as for neutralization of a panel of HIV-1 viruses. The particular monoclonal antibodies are indicated in FIGS. 15, 16 and 17. Binding to gp120 proteins by the series of monoclonal antibodies was first examined by ELISA (see FIG. 15A-15LL). Additionally, the ability of these monoclonal antibodies to neutralize HIV viruses was tested (see FIG. 16). The ELISA and neutralization assays were performed as described in Example 1.

[0854] Design and Construction of Partial Germline Reversions.

[0855] Heavy and light chains based on VRC01, NIH4546, and VRC07 were designed using CDR grafting and partial germline reversion mutations. Structure/function analyses and an iterative testing approach were used to determine which resides to revert to germline while maintaining gp120 binding. Different heavy and light chains were combined to create recombinant IgG molecules. Briefly, heavy and light chains were transfected into 293F cells. After 6 days, antibodies were harvested from the cell supernatant, purified using Protein G, and tested for gp120 binding in ELISAs. Select antibodies were chosen for neutralization analysis against a panel of 7-12 HIV-1s (see FIG. 16).

[0856] Neutralization of HIV-1 by Optimized, Partially Reverted VRC01, NIH4546, and VRC07 Antibodies.

[0857] Select antibodies were tested for neutralization against a panel of 7-12 HIVs (see FIG. 16). Antibodies, the percent divergence from germline for the heavy and light chains, the IC50 values (μg/ml), the breadth, and the potency are all listed. The neutralization potency is compared to VRC01. Three optimization strategies were selected: (A) Mutations at position 54 in the heavy chain have been shown to increase binding and neutralization breadth and potency. G54F/W/Y mutations were tested in select antibodies. These mutations universally improved potency and/or breadth compared to wild type antibodies. For example, mature VRC07 G54W is over twice as potent as VRC07 and over 8 times as potent as mature VRC01. When the G54F/W/Y mutation was added to partial germline reversion antibodies, in 13 of 15 antibodies tested potency was above that of mature VRC01. (B) VRC01 light chain contains an N-linked glycosylation site. Glycosylation can cause heterogeneous products, which should be avoided in clinical-grade preparations. Five light chain mutants (N72E/F/S/T and T74I) were tested with the VRC07 G54W heavy chain. VRC01L N72F had the highest potency of the mutants. (C) The introduction of the G54 mutation to VRC07 decreased solubility of the protein. A panel of mutants to increase solubility (VRC07_hp_H01, VRC07_hp_L01 and VRC07_hp_L02) was designed. VRC07 G54W and VRC07_hp_L02 increased potency over the parental VRC07 G54W antibody.

### Example 5

### Alanine Scan of VRC01 Heavy Chain

[0858] Structure based analysis was used to select VRC01 heavy or light chain amino acid residues for alanine substitution to interrogate the relevance of the corresponding amino acid for VRC01 binding to gp120 (See FIG. 18). Based on this analysis, expression vectors encoding the selected VRC01 alanine mutants (indicated in FIG. 19A-19C with reference to Kabat numbering) were generated using standard molecular biology techniques. The modified VRC01 heavy and light chains were complemented with the corresponding heavy or light chain (unmodified) and new antibodies were expressed, purified, and tested for binding affinity to the indicated HIV-1 gp120 proteins. The technology is based by BioLayer Interferometry Technology (BL₁) using a using FORTEBIO OCTET RED384™ system. The results illustrate that modification of specific VRC01 heavy and light chain residues can alter the binding affinity of VRC01 for gp120. In particular, the G54A substitution in the VRC01 heavy chain increased VRC01 binding affinity for gp120 by approximately one order of magnitude.

### Example 6

### HIV-1 Monoclonal Neutralizing Antibodies Specific to Gp120 for Detecting HIV-1 in a Subject

[0859] This example describes the use of HIV-1 monoclonal neutralizing antibodies specific to gp120 for the detection of HIV-1 in a subject. This example further describes the use of these antibodies to confirm the diagnosis of HIV-1 in a subject.

[0860] A biological sample, such as a blood sample is obtained from the patient diagnosed with, or suspected of having an HIV-1 infection. A blood sample taken from a patient who is not infected is used as a control. An ELISA is performed to detect the presence of HIV-1 in the blood sample. Proteins present in the blood samples (the patient sample and control sample) are immobilized on a solid support, such as a 96-well plate, according to methods well known in the art (see, for example, Robinson et al., Lancet 362:1612-1616, 2003, incorporated herein by reference). Following immobilization, HIV-1 monoclonal neutralizing antibodies specific to gp120 that is directly labeled with a fluorescent marker is applied to the protein-immobilized plate. The plate is washed in an appropriate buffer, such as PBS, to remove any unbound antibody and to minimize non-specific binding of antibody. Fluorescence can be detected using a fluorometric plate reader according to standard methods. An increase in fluorescence intensity of the patient sample, relative to the control sample, indicates the anti-gp120 antibody specifically bound proteins from the blood sample, thus detecting the presence of HIV-1 protein in the sample. Detection of HIV-1 protein in the patient sample indicates the patient has HIV-1, or confirms diagnosis of HIV-1 in the subject.

### Example 7

### HIV-1 Monoclonal Neutralizing Antibodies Specific to Gp120 for the Treatment of HIV-1

[0861] This example describes a particular method that can be used to treat HIV in a human subject by administration of one or more gp120 specific human neutralizing mAbs. Although particular methods, dosages, and modes of administrations are provided, one skilled in the art will appreciate that variations can be made without substantially affecting the treatment.

[0862] Based upon the teaching disclosed herein HIV-1 can be treated by administering a therapeutically effective amount of one or more of the neutralizing mAbs described herein, thereby reducing or eliminating HIV infection.

[0863] Screening Subjects.

[0864] In particular examples, the subject is first screened to determine if they have HIV. Examples of methods that can be used to screen for HIV include a combination of measuring a subject's CD4+ T cell count and the level of HIV in serum blood levels. Additional methods using the gp120-specific mAbs disclosed herein can also be used to screen for HIV.

[0865] In some examples, HIV testing consists of initial screening with an enzyme-linked immunosorbent assay (ELISA) to detect antibodies to HIV, such as to HIV-1. Specimens with a nonreactive result from the initial ELISA are considered HIV-negative unless new exposure to an infected partner or partner of unknown HIV status has occurred. Specimens with a reactive ELISA result are retested in duplicate. If the result of either duplicate test is reactive, the specimen is reported as repeatedly reactive and undergoes confirmatory testing with a more specific supplemental test (e.g., Western blot or an immunofluorescence assay (IFA)). Specimens that are repeatedly reactive by ELISA and positive by IFA or reactive by Western blot are considered HIV-positive and indicative of HIV infection. Specimens that are repeatedly ELISA-reactive occasionally provide an indeterminate Western blot result, which may be either an incomplete antibody response to HIV in an infected person, or nonspecific reactions in an uninfected person. IFA can be used to confirm infection in these ambiguous cases. In some instances, a second specimen will be collected more than a month later and retested for subjects with indeterminate Western blot results. In additional examples, nucleic acid testing (e.g., viral RNA or proviral DNA amplification method) can also help diagnosis in certain situations.

[0866] The detection of HIV in a subject's blood is indicative that the subject has HIV and is a candidate for receiving the therapeutic compositions disclosed herein. Moreover, detection of a CD4+T cell count below 350 per microliter, such as 200 cells per microliter, is also indicative that the subject is likely to have HIV.

[0867] Pre-screening is not required prior to administration of the therapeutic compositions disclosed herein.

[0868] Pre-Treatment of Subjects.

[0869] In particular examples, the subject is treated prior to administration of a therapeutic agent that includes one or more antiretroviral therapies known to those of skill in the art. However, such pre-treatment is not always required, and can be determined by a skilled clinician.

[0870] Administration of Therapeutic Compositions.

[0871] Following subject selection, a therapeutically effective dose of a gp120 specific neutralizing mAb described herein is administered to the subject (such as an adult human or a newborn infant either at risk for contracting HIV or known to be infected with HIV). Additional agents, such as anti-viral agents, can also be administered to the subject simultaneously or prior to or following administration of the disclosed agents. Administration can be achieved by any method known in the art, such as oral administration, inhalation, intravenous, intramuscular, intraperitoneal, or subcutaneous.

[0872] The amount of the composition administered to prevent, reduce, inhibit, and/or treat HIV or a condition associated with it depends on the subject being treated, the severity of the disorder, and the manner of administration of the therapeutic composition. Ideally, a therapeutically effective amount of an agent is the amount sufficient to prevent, reduce, and/or inhibit, and/or treat the condition (e.g., HIV) in a subject without causing a substantial cytotoxic effect in the subject. A therapeutically effective amount can be readily determined by one skilled in the art, for example using routine trials establishing dose response curves. As such, these compositions may be formulated with an inert diluent or with an pharmaceutically acceptable carrier.

[0873] In one specific example, antibodies are administered at 5 mg per kg every two weeks or 10 mg per kg every two weeks depending upon the particular stage of HIV. In an example, the antibodies are administered continuously. In another example, antibodies or antibody fragments are administered at 50 μg per kg given twice a week for 2 to 3 weeks. Administration of the therapeutic compositions can be taken long term (for example over a period of months or years).

[0874] Assessment.

[0875] Following the administration of one or more therapies, subjects having HIV can be monitored for reductions in HIV levels, increases in a subjects CD4+T cell count, or reductions in one or more clinical symptoms associated with HIV. In particular examples, subjects are analyzed one or more times, starting 7 days following treatment. Subjects can be monitored using any method known in the art. For example, biological samples from the subject, including blood, can be obtained and alterations in HIV or CD4+T cell levels evaluated.

[0876] Additional Treatments.

[0877] In particular examples, if subjects are stable or have a minor, mixed or partial response to treatment, they can be re-treated after re-evaluation with the same schedule and preparation of agents that they previously received for the desired amount of time, including the duration of a subject's lifetime. A partial response is a reduction, such as at least a 10%, at least 20%, at least 30%, at least 40%, at least 50%, or at least 70% in HIV infection, HIV replication or combination thereof. A partial response may also be an increase in CD4+T cell count such as at least 350 T cells per microliter.

### Example 8

### VRC07 G54 Mutants

### Materials and Methods

[0878] Generating the Mutants:

[0879] Position G54 was mutated to each possible amino acid (A, C, D, E, F, H, U, K, L, M, N, P, Q, R, S, T, V, W, and Y). Each heavy chain was transiently transfected with the VRC01 light chain into 293F cells. Supernatants were harvested 5-6 days later and IgG was purified with Protein A or Protein G resin.

[0880] ELISA (see FIGS. 20-22):

[0881] Each resulting antibody was tested for binding by ELISA to a panel of gp120s. Recombinant gp120 was coated onto ELISA plates at 2 ug/ml overnight. Plates were washed 3-5 times with PBS-T, blocked with a 1% FBS and 5% milk solution, and washed again. VRC07 G54 mutants were tested at 0.4 ug/ml with a one hour incubation period. Plates were washed, and a secondary HRP-conjugated goat anti-human IgG antibody was added at a 1:5000 dilution. Following a one hour incubation, plates were washed and developed with TMB. The reaction was stopped with 1M H2SO4, and optical density was read at 450 nm.

[0882] Anti-cardiolipin Assay (ACA) (FIG. 23):

[0883] Auto-reactivity of each VRC07 G54X mutant was analyzed with the QUANTA-LITE® ACA IgG III kit (INOVA Diagnostics™), an ELISA-based kit used clinically to diagnose autoimmune disorders. Each antibody was tested in serial three-fold dilutions starting at 100 ug/ml. Assay conditions were per manufacturer's protocol.

[0884] Neutralization (FIG. 24):

[0885] The antibodies with the highest binding the ELISA assays were tested in the TZM-bl neutralization assay, as described elsewhere in the patent.

### Results

[0886] ELISA binding results for each VRC07 G54X mutant is shown for a panel of gp120s: Clade A1 and A2 consensus gp120s (FIG. 20); consensus sequences for Glade B and C (FIG. 21); and gp120 Du172, a VRC01-resistant strain (FIG. 22). For comparison, VRC01, wild type VRC07 (G54), and a human IgG1 negative control are shown. All antibodies were also tested for auto reactivity using the ACA (FIG. 23).

[0887] Autoreactive antibodies (e.g., antibodies that bind to human antigens such as cardiolipin, a component of mitochondrial membranes) may not be safe for in vivo use. Four G54 mutants (A, H, L, and Q) had both high ELISA binding and were negative on the ACA assay. These antibodies were tested in a six-virus neutralization panel. The G54H mutation improved neutralization over the wildtype by 2.3-2.5 fold (IC50 and IC80 values, respectively) (FIG. 24). The sequence of this mutant is shown in FIG. 25.

### Example 9

### Partial Germline Reversions can Increase VRC07 Potency and Breadth

[0888] VRC01 and related antibodies target the CD4 binding site (CD4bs) of gp120, are broadly neutralizing and highly potent, and have undergone high levels of somatic hypermutation. To optimize such antibodies for passive immunization and to further understand antibody development, antibodies were reverted towards their putative germlines and the effects on breadth and potency were analyzed.

[0889] VRC01, VRC07, and related antibodies are highly somatically mutated and their germline antibodies fail to bind gp120 or neutralize HIV-1. Key germline reversion mutations were also generated that increased neutralization potential. Reducing somatic mutations can also reduce the in vivo immunogenicity of the antibodies.

[0890] Structure/function-based analyses were used to design partially reverted heavy and light chains based on the mature and germline sequences of VRC07. Mature CDRs were maintained and framework regions were back-mutated to germline sequence. The design strategy is shown in FIGS. 26 and 27. FIG. 28 shows the mature VRC07 sequence (sHV), and germline sequence (gHV) and a number of partial germline mutations (VRC07ghvH0X.X). Three non-limiting germline reversion positions of interest are outlined in boxes (FIG. 28). Similar nomenclature is used for the light chain, which is also shown in FIG. 28. Neutralization against a panel of tier 2 HIV-1 pseudotyped viruses was determined for select antibodies (FIG. 29).

[0891] The somatic mutations were reduced by one half (44% to 19%) in the heavy chain and one third (29% to 19%) in the light chain, and mature residues were iteratively added back. All back mutations were in the framework regions (FIG. 28). Most germline reversions were able to maintain basic functions, such as gp120 binding. Three germline mutations were identified in the heavy chain (Arg3Gln, Ile37Val, Thr93Ala) that increased potency by 1.3-fold (FIG. 29). The locations of these three mutations are shown in the VRC07 crystal structure in FIG. 30.

### Example 10

### N-Terminal Modifications of Light Chains

[0892] An alanine screen of the light chain gp120-contact residues showed that mutating Val3 to Ala on the light chain resulted in a 4-fold increase in binding (FIG. 19A). Additionally, the solved crystal structures of VRC01 and VRC07 lacked resolution of the two most N-terminal residues (VRC01) or 1 residue (VRC07), suggesting these residues did not make critical contact within the antibody or with gp120 (FIG. 31). The N-terminal domain of VRC01 light chain, including deletions and Ala and Gly substitutions of amino acids #1-4 is shown in FIG. 32. The light chains presented below can paired with any of the heavy chains disclosed herein.

[0893] Generating the Mutants:

[0894] Mutations were introduced into the plasmids using site-directed mutagenesis. Each resulting light chain was transfected with a VRC07 variant heavy chain into 293F cells. Supernatants were harvested 5-6 days later and IgG was purified with Protein A or Protein G resin.

[0895] Neutralization:

[0896] All antibodies were tested in the TZM-bl assay as described previously (see, e.g., PCT Pub. WO2011/038290).

[0897] Results.

[0898] A two amino acid deletion on a number of different of light chains resulted in an increased potency of ˜2.5-fold (FIG. 33). Other N-terminal modifications increased neutralization potency up to 2.8 fold (FIG. 34).

### Light Chain Consensus for N-Term Modifications:

[0899] X₁X₂X₃X₄TQSPGTLSLSPGETAIISCRTSQYGSLAWYQQRPGQAPRLVIYSGSTRAAGIPDRFS GSRWGPDYX₅LTISNLESGDFGVYYCQQYEFFGQGTKVQVDIK (SEQ ID NO: 42), wherein X₁=E, G, A, deletion; X₂=I, G, A, deletion; X₃=V, G, A, deletion; X₄=L, G, A, deletion; X₅=N, F or T

### Exemplary Combinations:

[0900] (A) 4 different deletions (del-I-V-L; del-del-V-L; del-del-del-L; del-del-del-del, corresponding to
[0901] i) SEQ ID NO: 42, wherein X₁ is no amino acid; X₂ is I; X₃ is V; X₄ is L; and X₅ is N, F or T;
[0902] ii) SEQ ID NO: 42, wherein X₁ is no amino acid; X₂ is no amino acid; X₃ is V; X₄ is L; and X₅ is N, F or T;
[0903] iii) SEQ ID NO: 42, wherein X₁ is no amino acid; X₂ is no amino acid; X₃ is no amino acid; X₄ is L; and X₅ is N, F or T;
[0904] iv) SEQ ID NO: 42, wherein X₁ is no amino acid; X₂ is no amino acid; X₃ is V; X₄ is no amino acid; and X₅ is N, F or T;

[0905] (B) 4 alanine substitutions (same four combinations as above, but substitute Ala for deletion)
[0906] i) SEQ ID NO: 42, wherein X₁ is A; X₂ is I; X₃ is V; X₄ is L; and X₅ is N, F or T;
[0907] ii) SEQ ID NO: 42, wherein X₁ is A; X₂ is A; X₃ is V; X₄ is L; and X₅ is N, F or T;
[0908] iii) SEQ ID NO: 42, wherein X₁ is A; X₂ is A; X₃ is A; X₄ is L; and X₅ is N, F or T;
[0909] iv) SEQ ID NO: 42, wherein X₁ is A; X₂ is A; X₃ is V; X₄ is A; and X₅ is N, F or T;

[0910] (C) 4 glycine substitution (same four combinations as above, but substitute Gly for Del)
[0911] i) SEQ ID NO: 42, wherein X₁ is G; X₂ is I; X₃ is V; X₄ is L; and X₅ is N, F or T;
[0912] ii) SEQ ID NO: 42, wherein X₁ is G; X₂ is G; X₃ is V; X₄ is L; and X₅ is N, F or T;
[0913] iii) SEQ ID NO: 42, wherein X₁ is G; X₂ is G; X₃ is G; X₄ is L; and X₅ is N, F or T;
[0914] iv) SEQ ID NO: 42, wherein X₁ is G; X₂ is G; X₃ is G; X₄ is G; and X₅ is N, F or T;

[0915] (D) Del-del-V3A, i) SEQ ID NO: 42, wherein X₁ is no amino acid; X₂ is no amino acid; X₃ is A; X₄ is L; and X₅ is N, F or T;

[0916] (E) Del-Del-V3G, SEQ ID NO: 42, wherein X₁ is no amino acid; X₂ is no amino acid; X₃ is V; X₄ is L; and X₅ is N, F or T.

[0917] Additionally, the two amino acid deletion (E1/I2 deletion) plus (D) and (E) above were combined with additional amino acid substitutions to generate the following consensus light chain sequence:

X₁X₂X₃LTQSPGTLSLSPGETAX₄ISCRTSQYGSLAWYQQRPGQAPRLVIYSGSTRAAGIPDRFSGSRX₅ GPDYX₈LTISNLESGDFGVYYCQQYEFFGQGTKVQX₆DX₇K (SEQ ID NO: 43, wherein X₁ is no amino acid or E, X₂ is no amino acid or I, X₃ is V, A or G, X₄ is T or I, X₅ is S or W; X₆ is V or Q, X₇ is N or I and X₈ is N or F). Specific sequences were complemented with VRC07 heavy chain and tested for binding to gp120, neutralization potency and self-reactivity, including:
EIVLTQSPGTLSLSPGETATISCRTSQYGSLAWYQQRPGQAPRLVIYSGSTRAAGIPDRFSGSRSGPD YTLTISNLESGDFGVYYCQQYEFFGQGTKVQQDNK (SEQ ID NO: 50; VRC01_hp-L02; SEQ ID NO: 43, wherein X₁ is E, X₂ is I, X₃ is V, X₄ is T, X₅ is 5, X₆ is Q, X₇ is N and X₈ is T); as well as SEQ ID NO: 43, wherein X₁ is no amino acid, X₂ is no amino acid, X₃ is A, X₄ is T, X₅ is 5, X₆ is Q, X₇ is N and X₈ is N or F; and SEQ ID NO: 43, wherein X₁ is no amino acid, X₂ is no amino acid, X₃ is G, X₄ is T, X₅ is 5, X₆ is Q, X₇ is N, and X₈ is N or F.

[0918] In some embodiments the light chain variable domain of the antibody includes:

X₁X₂X₃LTQSPGTLSLSPGEX₄AX₅ISCRTSQYGSLAWYQQX₆PGQAPRLVIYSGSTRAAGIPDRFSGSR X₇GPDYX₈LTISX₉LESGDFGVYYCQQYEFFGX₁₀GTKVQVDIK (SEQ ID NO: 44, wherein X₁ is no amino acid or E, X₂ is no amino acid or I, X₃ is V, A or G, X₄ is R or T; X₅ is T or I, X₆ is K or R, X₇ is S or W, X₈ is T or N, X₉ is S or N, and X₁₀ is P or Q). Specific sequences were complemented with VRC07 heavy chain and tested for binding to gp120, neutralization potency and self-reactivity, including: E¹VLTQSPGTLSLSPGERATISCRTSQYGSLAWYQQKPGQAPRLVIYSGSTRAAGIPDRFSGSRSGPD YTLTISSLESGDFGVYYCQQYEFFGPGTKVQVDIK (SEQ ID NO: 51; VRC07ghvL05, which is SEQ ID NO: 44, wherein X₁ is E, X₂ is I, X₃ is V, X₄ is R; X₅ is T, X₆ is K, X₇ is 5, X₈ is T, X₉ is S, and X₁₀ is P); SEQ ID NO: 44, wherein X₁ is no amino acid, X₂ is no amino acid, X₃ is A, X₄ is R; X₅ is T, X₆ is K, X₇ is 5, X₈ is T, X₉ is S, and X₁₀ is P; and SEQ ID NO: 44, wherein X₁ is no amino acid, X₂ is no amino acid, X₃ is G, X₄ is R; X₅ is T, X₆ is K, X₇ is 5, X₈ is T, X₉ is S, and X₁₀ is P
In additional embodiments the light chain variable domain includes one of:

1. VRC01L:
(SEQ ID NO: 9)
EIVLTQSPGTLSLSPGETAIISCRTSQYGSLAWYQQRPGQAPRLVIYSGS
TRAAGIPDRFSGSRWGPDYNLTISNLESGDFGVYYCQQYEFFGQGTKVQV
DIK
2. VRC01-E1/I2-deletion:
(SEQ ID NO: 53)
VLTQSPGTLSLSPGETAIISCRTSQYGSLAWYQQRPGQAPRLVIYSGSTR
AAGIPDRFSGSRWGPDYNLTISNLESGDFGVYYCQQYEFFGQGTKVQVDI
K
3. VRC01-N72T-E1/I2-deletion:
(SEQ ID NO: 54)
VLTQSPGTLSLSPGETAIISCRTSQYGSLAWYQQRPGQAPRLVIYSGSTR
AAGIPDRFSGSRWGPDYTLTISNLESGDFGVYYCQQYEFFGQGTKVQVDI
K
4. VRC01hpL02:
(SEQ ID NO: 50)
EIVLTQSPGTLSLSPGETATISCRTSQYGSLAWYQQRPGQAPRLVIYSGS
TRAAGIPDRFSGSRSGPDYTLTISNLESGDFGVYYCQQYEFFGQGTKVQQ
DNK
5. VRC01hpL02-E1/I2-deletion:
(SEQ ID NO: 56)
VLTQSPGTLSLSPGETATISCRTSQYGSLAWYQQRPGQAPRLVIYSGSTR
AAGIPDRFSGSRSGPDYTLTISNLESGDFGVYYCQQYEFFGQGTKVQQDN
K

### Example 11

### Plasmids and Plasmid Inserts

[0919] The following are the names and corresponding SEQ ID NOs of the nucleotide sequence of plasmid inserts for expression of variant VRC07 heavy chains:

TABLE 2
Plasmid names and Sequences

| Heavy or Light Chain | Insert | Plasmid |
|---|---|---|
| Name | SEQ ID NO | SEQ ID NO |
| VRC07 S58N | 57 | 58 |
| VRC07ghvH05.1 | 59 | 60 |
| VRC07ghvH05.2 | 61 | 62 |
| VRC07ghvH05.3 | 63 | 64 |
| VRC07ghvH05.3.1 | 65 | 66 |
| VRC07ghvH05.3.2 | 67 | 68 |
| VRC07ghvH05.3.3 | 69 | 70 |
| VRC07ghvH05.3.4 | 71 | 72 |
| VRC07ghvH05.3.5 | 73 | 74 |
| VRC07ghvH05.3.6 | 75 | 76 |
| VRC07ghvH05.4 | 77 | 78 |
| VRC07ghvH05.4.1 | 79 | 80 |
| VRC07ghvH05.4.2 | 81 | 82 |
| VRC07ghvH05.4.3 | 83 | 84 |
| VRC07ghvH05.4.4 | 85 | 86 |
| VRC07ghvH05.4.5 | 87 | 88 |
| VRC07ghvH05.4.6 | 89 | 90 |
| V1v7h3m02G54W | 91 | 92 |
| V1v7h3m03G54W | 93 | 94 |
| VRC07H G54W I30Q | 95 | 96 |
| VRC07H G54W I30R | 97 | 98 |
| VRC07H G54W S58N | 99 | 100 |
| VRC07ghvH05 | 109 | 110 |
| VRC01ghvL05 | 111 | 112 |
| VRC07chH01 | 113 | 114 |
| VRC01chL01 | 115 | 116 |
| VRC07hpH01 | 117 | 118 |
| VRC01hpL01 | 119 | 120 |
| VRC01hpL02 | 121 | 122 |
| VRC01ghvH03 | 123 | 124 |
| NIH4546H | 125 | 126 |
| NIH4546ghvH01 | 127 | 128 |
| NIH4546ghvH02 | 129 | 130 |
| VRC07ghvH01 | 131 | 132 |
| VRC07ghvH02 | 133 | 134 |
| VRC01ghvL02 | 135 | 136 |
| VRC01ghvL04 | 137 | 138 |
| VRC01-L-N72T | 139 | 140 |
| NIH4546L | 141 | 142 |
| NIH4546ghvL01 | 143 | 144 |
| VRC07ghvH04.1 | 145 | 146 |
| VRC07ghvH04.2 | 147 | 148 |
| VRC07CDRH2.M1 | 149 | 150 |
| VRC07CDRH2.M2 | 151 | 152 |
| NIH4546H G54F | 153 | 154 |
| NIH4546H G54W | 155 | 156 |
| VRC01ghvL02 | 157 | 158 |
| VRC01ghvL04 | 159 | 160 |
| VRC01H G54F | 161 | 162 |
| VRC01H G54W | 163 | 164 |
| VRC01ghvL02 | 165 | 166 |
| VRC01ghvL04 | 167 | 168 |
| VRC01L N72E | 169 | 170 |
| VRC01L N72F | 171 | 172 |
| VRC01L N72S | 173 | 174 |
| VRC01L T74I | 175 | 176 |
| VRC07 CDRH2.M1 G54F | 177 | 178 |
| VRC07 CDRH2.M1 G54W | 179 | 180 |
| VRC07 CDRH2.M1 G54Y | 181 | 182 |
| VRC07ghvH04.1 G54F | 183 | 184 |
| VRC07ghvH04.1 G54W | 185 | 186 |
| VRC07ghvH04.1 G54Y | 187 | 188 |
| VRC07ghvH04.2 G54F | 189 | 190 |
| VRC07ghvH04.1 G54Y | 191 | 192 |
| VRC07ghvH04.2 G54F | 193 | 194 |

[0920] Additional nucleotide and protein sequences for plasmid inserts for expression of variant VRC07 heavy chains:

TABLE 3
Plasmid names and Sequences

| | Insert nucleotide | Insert protein |
|---|---|---|
| Heavy Chain Name | SEQ ID NO | SEQ ID NO |
| VRC07 H G54F | 101 | 102 |
| VRC07 H G54R | 103 | 104 |
| VRC07 H G54W | 105 | 106 |
| VRC07 H G54Y | 107 | 108 |

[0921] In view of the many possible embodiments to which the principles of the disclosure may be applied, it should be recognized that illustrated embodiments are only examples and should not be considered a limitation on the scope of the claims. We therefore claim all that comes within the scope and spirit of these claims.

The application's sequence listing, which the Patent Office published only in electronic form, follows.

SEQUENCE LISTING (260 sequences)

SEQ ID NO: 1 - protein, 125 aa, Artificial Sequence
  Description of Artificial Sequence: Synthetic consensus sequence
  MISC_FEATURE (11)..(11): Met or Val
  MISC_FEATURE (28)..(28): Glu or Asp
  MISC_FEATURE (30)..(30): Ile, Arg or Gln
  MISC_FEATURE (43)..(43): Lys or Arg
  MISC_FEATURE (51)..(51): Met or Val
  MISC_FEATURE (55)..(55): Ala, His, Lys, Met, Gln, Val, Gly, Phe, Arg, Tyr or Trp
  MISC_FEATURE (59)..(59): Asn or Ser
  MISC_FEATURE (64)..(64): Leu or Phe
  MISC_FEATURE (74)..(74): Met or Val
  MISC_FEATURE (77)..(77): Glu or Asp
  MISC_FEATURE (85)..(85): Ser, Ala or Pro
  MISC_FEATURE (117)..(117): Gln or Arg
  MISC_FEATURE (120)..(120): Pro or Leu
QVRLSQSGGQXKKPGDSMRISCRASGYXFXNCPINWIRLAPGXRPEWMGWXKPRXGAVXYARQXQGRVTMTRDXYSXTAFLELRXLTSDDTAVYFCTRGKYCTARDYYNWDFEHWGXGTXVTVSS

SEQ ID NO: 2 - protein, 125 aa, Artificial Sequence
  Description of Artificial Sequence: Synthetic polypeptide
QVRLSQSGGQMKKPGDSMRISCRASGYEFINCPINWIRLAPGKRPEWMGWMKPRGGAVSYARQLQGRVTMTRDMYSETAFLELRSLTSDDTAVYFCTRGKYCTARDYYNWDFEHWGQGTPVTVSS

SEQ ID NO: 3 - protein, 125 aa, Artificial Sequence
  Description of Artificial Sequence: Synthetic polypeptide
QVRLSQSGGQVKKPGDSMRISCRASGYDFINCPINWIRLAPGRRPEWMGWVKPRGGAVNYARQFQGRVTMTRDVYSDTAFLELRALTSDDTAVYFCTRGKYCTARDYYNWDFEHWGRGTLVTVSS

SEQ ID NO: 4 - protein, 125 aa, Artificial Sequence
  Description of Artificial Sequence: Synthetic polypeptide
QVRLSQSGGQVKKPGDSMRISCRASGYDFINCPINWIRLAPGRRPEWMGWVKPRGGAVNYARQFQGRVTMTRDVYSDTAFLELRPLTSDDTAVYFCTRGKYCTARDYYNWDFEHWGRGTLVTVSS

SEQ ID NO: 5 - protein, 122 aa, Artificial Sequence
  Description of Artificial Sequence: Synthetic polypeptide
QVQLVQSGGQMKKPGESMRISCRASGYEFIDCTLNWIRLAPGKRPEWMGWLKPRGGAVNYARPLQGRVTMTRDVYSDTAFLELRSLTVDDTAVYFCTRGKNCDYNWDFEHWGRGTPVIVSSP

SEQ ID NO: 6 - protein, 103 aa, Artificial Sequence
  Description of Artificial Sequence: Synthetic consensus sequence
  MISC_FEATURE (9)..(9): Ala or Gly
  MISC_FEATURE (18)..(18): Arg or Thr
  MISC_FEATURE (21)..(21): Ile or Leu
  MISC_FEATURE (26)..(26): Ser or Thr
  MISC_FEATURE (48)..(48): Ser or Ala
  MISC_FEATURE (54)..(54): Ala or Thr
  MISC_FEATURE (67)..(67): Ala or Pro
  MISC_FEATURE (68)..(68): Glu or Asp
  MISC_FEATURE (79)..(79): Glu or Gly
EIVLTQSPXTLSLSPGEXAIXSCRTXQYGSLAWYQQRPGQAPRLVIYXGSTRAXGIPDRFSGSRWGXXYNLTISNLESXDFGVYYCQQYEFFGQGTKVQVDIK

SEQ ID NO: 7 - protein, 103 aa, Artificial Sequence
  Description of Artificial Sequence: Synthetic polypeptide
EIVLTQSPATLSLSPGERAIISCRTSQYGSLAWYQQRPGQAPRLVIYAGSTRATGIPDRFSGSRWGAEYNLTISNLESEDFGVYYCQQYEFFGQGTKVQVDIK

SEQ ID NO: 8 - protein, 103 aa, Artificial Sequence
  Description of Artificial Sequence: Synthetic polypeptide
EIVLTQSPATLSLSPGERAIISCRTTQYGSLAWYQQRPGQAPRLVIYAGSTRATGIPDRFSGSRWGADYNLTISNLESEDFGVYYCQQYEFFGQGTKVQVDIK

SEQ ID NO: 9 - protein, 104 aa, Artificial Sequence
  Description of Artificial Sequence: Synthetic polypeptide
EIVLTQSPGTLSLSPGETAIISCRTSQYGSLAWYQQRPGQAPRLVIYSGSTRAAGIPDRFSGSRWGPDYNLTISNLESGDFGVYYCQQYEFFGQGTKVQVDIKR

SEQ ID NO: 10 - DNA, 375 bp, Artificial Sequence
  Description of Artificial Sequence: Synthetic polynucleotide
caggtgcgactgtcgcagtctggaggtcagatgaagaagcctggcgactcgatgagaatttcttgtcgggcttcgggatacgaatttattaattgtccaataaattggattcggctggcccccggaaaaaggcctgagtggatgggatggatgaagcctagggggggggccgtcagttacgcacgtcaacttcagggcagagtgaccatgactcgagacatgtattccgagacagcctttttggagctccgttccttgacatccgacgacacggccgtctatttttgtactcggggaaaatattgcactgcgcgcgactattataattgggacttcgaacactggggccagggcaccccggtcaccgtctcgtca

SEQ ID NO: 11 - DNA, 375 bp, Artificial Sequence
  Description of Artificial Sequence: Synthetic polynucleotide
caagtgcgactgtcgcagtctggaggtcaggtgaagaagcctggcgactcgatgagaatttcttgtcgggcttctggatatgacttcattaactgtcctataaattggatccgcctggcccccggaagaaggcctgagtggatgggatgggtgaagcctagggggggggccgtgaattacgcacgccaatttcagggcagagtgaccatgactcgagacgtctacagcgacacagcctttttggagctgcgcgccttgacatcagacgacacggccgtctacttttgtactaggggaaaatactgtactgcgcgcgactattacaattgggacttcgaacactggggccggggcaccctggtcaccgtctcttca

SEQ ID NO: 12 - DNA, 375 bp, Artificial Sequence
  Description of Artificial Sequence: Synthetic polynucleotide
caagtgcgactgtcgcagtctggaggtcaggtgaagaagcctggcgactcgatgagaatttcttgtcgggcttctggatatgacttcattaattgtcctataaattggatccgcctggcccccggaagaaggcctgagtggatgggatgggtgaagcctagggggggggccgttaattacgcacgccaatttcagggcagagtgaccatgacgcgagacgtgtattccgacacagcctttttggaactgcgccccttgacatcagacgacacggccgtctatttttgcactaggggaaaatactgtactgcgcgcgactattacaattgggacttcgaacactggggccggggcaccctcgtcaccgtctcatca

SEQ ID NO: 13 - DNA, 365 bp, Artificial Sequence
  Description of Artificial Sequence: Synthetic polynucleotide
caggtgcagctggtgcagtctgggggtcagatgaagaagcctggcgagtcgatgagaatttcttgtcgggcttctggatatgaatttattgattgtacgctaaattggattcgtctggcccccggaaaaaggcctgagtggatgggatggctgaagcctcgggggggggccgtcaactacgcacgtccacttcagggcagagtgaccatgactcgagacgtttattccgacacagcctttttggagctgcgctcgttgacagtagacgacacggccgtctacttttgtactaggggaaaaaactgtgattacaattgggacttcgaacactggggccggggcaccccggtcatcgtctcatcacc

SEQ ID NO: 14 - DNA, 309 bp, Artificial Sequence
  Description of Artificial Sequence: Synthetic polynucleotide
gaaattgtgttgacacagtctccagccaccctgtctttgtctccaggggaaagagccatcctctcttgtcggaccagtcagtatggttccttagcctggtaccaacagaggcccggccaggcccccaggctcgtcatctatgctggctctactagggccactggcatcccagacaggttcagcggcagtaggtggggggcagagtacaatctcaccatcagcaacctggagtcggaagattttggtgtttattattgtcagcagtatgaattttttggccaggggaccaaggtccaggtcgacattaag

SEQ ID NO: 15 - DNA, 309 bp, Artificial Sequence
  Description of Artificial Sequence: Synthetic polynucleotide
gaaattgtgttgacacagtctccagccaccctgtctttgtctccaggggaaagagccatcctctcttgtcggaccactcagtatggttccttagcctggtaccaacagaggcccggccaggcccccaggctcgtcatctatgctggctctactagggccactggcatcccagacaggttcagcggcagtaggtggggggcagactacaatctcaccatcagcaacctggagtcggaagattttggtgtttattattgtcagcagtatgaattttttggccaggggaccaaggtccaggtcgacattaaa

SEQ ID NO: 16 - DNA, 312 bp, Artificial Sequence
  Description of Artificial Sequence: Synthetic polynucleotide
gaaattgtgttgacacagtctccaggcaccctgtctttgtctccaggggaaacagccatcatctcttgtcggaccagtcagtatggttccttagcctggtatcaacagaggcccggccaggcccccaggctcgtcatctattcgggctctactcgggccgctggcatcccagacaggttcagcggcagtcggtgggggccagactacaatctcaccatcagcaacctggagtcgggagattttggtgtttattattgccagcagtatgaattttttggccaggggaccaaggtccaggtcgacattaagcga

SEQ ID NO: 17 - DNA, 24 bp, Artificial Sequence
  Description of Artificial Sequence: Synthetic primer
acaggtgcccactcccaggtgcag

SEQ ID NO: 18 - DNA, 21 bp, Artificial Sequence
  Description of Artificial Sequence: Synthetic primer
gcagccacaggtgcccactcc

SEQ ID NO: 19 - DNA, 22 bp, Artificial Sequence
  Description of Artificial Sequence: Synthetic primer
cagcagctacaggcacccacgc

SEQ ID NO: 20 - DNA, 25 bp, Artificial Sequence
  Description of Artificial Sequence: Synthetic primer
ggcagcagctacaggtgtccagtcc

SEQ ID NO: 21 - DNA, 27 bp, Artificial Sequence
  Description of Artificial Sequence: Synthetic primer
gggggaagaccgatgggcccttggtgg

SEQ ID NO: 22 - DNA, 21 bp, Artificial Sequence
  Description of Artificial Sequence: Synthetic primer
gggaattctcacaggagacga

SEQ ID NO: 23 - protein, 125 aa, Artificial Sequence
  Description of Artificial Sequence: Synthetic consensus sequence
  MISC_FEATURE (30)..(30): Ile, Arg or Gln
  MISC_FEATURE (55)..(55): Gly, Phe, Arg, Tyr or Trp
  MISC_FEATURE (59)..(59): Ser or Asn
QVRLSQSGGQMKKPGDSMRISCRASGYEFXNCPINWIRLAPGKRPEWMGWMKPRXGAVXYARQLQGRVTMTRDMYSETAFLELRSLTSDDTAVYFCTRGKYCTARDYYNWDFEHWGQGTPVTVSS

SEQ ID NO: 24 - protein, 125 aa, Artificial Sequence
  Description of Artificial Sequence: Synthetic polypeptide
QVRLSQSGGQMKKPGDSMRISCRASGYEFQNCPINWIRLAPGKRPEWMGWMKPRWGAVSYARQLQGRVTMTRDMYSETAFLELRSLTSDDTAVYFCTRGKYCTARDYYNWDFEHWGQGTPVTVSS

SEQ ID NO: 25 - protein, 125 aa, Artificial Sequence
  Description of Artificial Sequence: Synthetic polypeptide
QVRLSQSGGQMKKPGDSMRISCRASGYEFRNCPINWIRLAPGKRPEWMGWMKPRWGAVSYARQLQGRVTMTRDMYSETAFLELRSLTSDDTAVYFCTRGKYCTARDYYNWDFEHWGQGTPVTVSS

SEQ ID NO: 26 - protein, 125 aa, Artificial Sequence
  Description of Artificial Sequence: Synthetic polypeptide
QVRLSQSGGQMKKPGDSMRISCRASGYEFINCPINWIRLAPGKRPEWMGWMKPRWGAVNYARQLQGRVTMTRDMYSETAFLELRSLTSDDTAVYFCTRGKYCTARDYYNWDFEHWGQGTPVTVSS

SEQ ID NO: 27 - protein, 104 aa, Artificial Sequence
  Description of Artificial Sequence: Synthetic polypeptide
EIVLTQSPGTLSLSPGETAIISCRTSQYGSLAWYQQRPGQAPRLVIYSGSTRAAGIPDRFSGSRWGPDYALTISNLESGDFGVYYCQQYEFFGQGTKVQVDIKR

SEQ ID NO: 28 - protein, 125 aa, Artificial Sequence
  Description of Artificial Sequence: Synthetic polypeptide
QVRLSQSGGQMKKPGDSMRISCRASGYEFINCPINWIRLAPGKRPEWMGWMKPRWGAVSYARQLQGRVTMTRDMYSETAFLELRSLTSDDTAVYFCTRGKYCTARDYYNWDFEHWGQGTPVTVSS

SEQ ID NO: 29 - protein, 125 aa, Artificial Sequence
  Description of Artificial Sequence: Synthetic consensus sequence
  MISC_FEATURE (11)..(11): Met or Val
  MISC_FEATURE (28)..(28): Glu or Asp
  MISC_FEATURE (43)..(43): Lys or Arg
  MISC_FEATURE (51)..(51): Met or Val
  MISC_FEATURE (59)..(59): Asn or Ser
  MISC_FEATURE (64)..(64): Leu or Phe
  MISC_FEATURE (74)..(74): Met or Val
  MISC_FEATURE (77)..(77): Glu or Asp
  MISC_FEATURE (85)..(85): Ser, Ala or Pro
  MISC_FEATURE (117)..(117): Gln or Arg
  MISC_FEATURE (120)..(120): Pro or Leu
QVRLSQSGGQXKKPGDSMRISCRASGYXFINCPINWIRLAPGXRPEWMGWXKPRGGAVXYARQXQGRVTMTRDXYSXTAFLELRXLTSDDTAVYFCTRGKYCTARDYYNWDFEHWGXGTXVTVSS

SEQ ID NO: 30 - protein, 125 aa, Artificial Sequence
  Description of Artificial Sequence: Synthetic polypeptide
  MISC_FEATURE (55)..(55): Ala, Phe, His, Lys, Met, Gln, Arg, Val, Trp or Tyr
QVRLSQSGGQMKKPGDSMRISCRASGYEFINCPINWIRLAPGKRPEWMGWMKPRXGAVSYARQLQGRVTMTRDMYSETAFLELRSLTSDDTAVYFCTRGKYCTARDYYNWDFEHWGQGTPVTVSS

SEQ ID NO: 31 - protein, 125 aa, Artificial Sequence
  Description of Artificial Sequence: Synthetic polypeptide
QVRLSQSGGQMKKPGDSMRISCRASGYEFINCPINWIRLAPGKRPEWMGWMKPRAGAVSYARQLQGRVTMTRDMYSETAFLELRSLTSDDTAVYFCTRGKYCTARDYYNWDFEHWGQGTPVTVSS

SEQ ID NO: 32 - protein, 125 aa, Artificial Sequence
  Description of Artificial Sequence: Synthetic polypeptide
QVRLSQSGGQMKKPGDSMRISCRASGYEFINCPINWIRLAPGKRPEWMGWMKPRHGAVSYARQLQGRVTMTRDMYSETAFLELRSLTSDDTAVYFCTRGKYCTARDYYNWDFEHWGQGTPVTVSS

SEQ ID NO: 33 - protein, 125 aa, Artificial Sequence
  Description of Artificial Sequence: Synthetic polypeptide
QVRLSQSGGQMKKPGDSMRISCRASGYEFINCPINWIRLAPGKRPEWMGWMKPRKGAVSYARQLQGRVTMTRDMYSETAFLELRSLTSDDTAVYFCTRGKYCTARDYYNWDFEHWGQGTPVTVSS

SEQ ID NO: 34 - protein, 125 aa, Artificial Sequence
  Description of Artificial Sequence: Synthetic polypeptide
QVRLSQSGGQMKKPGDSMRISCRASGYEFINCPINWIRLAPGKRPEWMGWMKPRMGAVSYARQLQGRVTMTRDMYSETAFLELRSLTSDDTAVYFCTRGKYCTARDYYNWDFEHWGQGTPVTVSS

SEQ ID NO: 35 - protein, 125 aa, Artificial Sequence
  Description of Artificial Sequence: Synthetic polypeptide
QVRLSQSGGQMKKPGDSMRISCRASGYEFINCPINWIRLAPGKRPEWMGWMKPRQGAVSYARQLQGRVTMTRDMYSETAFLELRSLTSDDTAVYFCTRGKYCTARDYYNWDFEHWGQGTPVTVSS

SEQ ID NO: 36 - protein, 125 aa, Artificial Sequence
  Description of Artificial Sequence: Synthetic polypeptide
QVRLSQSGGQMKKPGDSMRISCRASGYEFINCPINWIRLAPGKRPEWMGWMKPRVGAVSYARQLQGRVTMTRDMYSETAFLELRSLTSDDTAVYFCTRGKYCTARDYYNWDFEHWGQGTPVTVSS

SEQ ID NO: 37 - skipped

SEQ ID NO: 38 - protein, 125 aa, Artificial Sequence
  Description of Artificial Sequence: Synthetic consensus sequence
  MISC_FEATURE (3)..(3): Gln or Arg
  MISC_FEATURE (37)..(37): Val or Ile
  MISC_FEATURE (97)..(97): Ala or Thr
QVXLSQSGGQMKKPGDSMRISCRASGYEFINCPINWXRLAPGKRPEWMGWMKPRGGAVSYARQLQGRVTMTRDMYSETAFLELRSLTSDDTAVYFCXRGKYCTARDYYNWDFEHWGQGTPVTVSS

SEQ ID NO: 39 - protein, 125 aa, Artificial Sequence
  Description of Artificial Sequence: Synthetic polypeptide
QVQLSQSGGQMKKPGDSMRISCRASGYEFINCPINWVRLAPGKRPEWMGWMKPRGGAVSYARQLQGRVTMTRDMYSETAFLELRSLTSDDTAVYFCARGKYCTARDYYNWDFEHWGQGTPVTVSS

SEQ ID NO: 40 - protein, 125 aa, Artificial Sequence
  Description of Artificial Sequence: Synthetic consensus sequence
  MISC_FEATURE (37)..(37): Ile or Val
  MISC_FEATURE (55)..(55): Gly or His
  MISC_FEATURE (59)..(59): Ser or Asn
  MISC_FEATURE (97)..(97): Thr or Ala
QVRLSQSGGQMKKPGDSMRISCRASGYEFINCPINWXRLAPGKRPEWMGWMKPRXGAVXYARQLQGRVTMTRDMYSETAFLELRSLTSDDTAVYFCXRGKYCTARDYYNWDFEHWGQGTPVTVSS

SEQ ID NO: 41 - protein, 103 aa, Artificial Sequence
  Description of Artificial Sequence: Synthetic consensus sequence
  MISC_FEATURE (1)..(2): May or may not be present
  MISC_FEATURE (20)..(20): Thr or Ile
  MISC_FEATURE (65)..(65): Trp or Ser
  MISC_FEATURE (70)..(70): Asn or Thr
  MISC_FEATURE (100)..(100): Val or Gln
  MISC_FEATURE (102)..(102): Ile or Asn
EIVLTQSPGTLSLSPGETAXISCRTSQYGSLAWYQQRPGQAPRLVIYSGSTRAAGIPDRFSGSRXGPDYXLTISNLESGDFGVYYCQQYEFFGQGTKVQXDXK

SEQ ID NO: 42 - protein, 103 aa, Artificial Sequence
  Description of Artificial Sequence: Synthetic consensus sequence
  MISC_FEATURE (1)..(1): Glu, Gly, Ala or absent
  MISC_FEATURE (2)..(2): Ile, Gly, Ala or absent
  MISC_FEATURE (3)..(3): Val, Gly, Ala or absent
  MISC_FEATURE (4)..(4): Leu, Gly, Ala or absent
  MISC_FEATURE (70)..(70): Asn, Phe or Thr
XXXXTQSPGTLSLSPGETAIISCRTSQYGSLAWYQQRPGQAPRLVIYSGSTRAAGIPDRFSGSRWGPDYXLTISNLESGDFGVYYCQQYEFFGQGTKVQVDIK

SEQ ID NO: 43 - protein, 103 aa, Artificial Sequence
  Description of Artificial Sequence: Synthetic polypeptide
  MISC_FEATURE (1)..(2): May or may not be present
  MISC_FEATURE (3)..(3): Val, Ala or Gly
  MISC_FEATURE (20)..(20): Thr or Ile
  MISC_FEATURE (65)..(65): Ser or Trp
  MISC_FEATURE (70)..(70): Asn or Phe
  MISC_FEATURE (100)..(100): Val or Gln
  MISC_FEATURE (102)..(102): Asn or Ile
EIXLTQSPGTLSLSPGETAXISCRTSQYGSLAWYQQRPGQAPRLVIYSGSTRAAGIPDRFSGSRXGPDYXLTISNLESGDFGVYYCQQYEFFGQGTKVQXDXK

SEQ ID NO: 44 - protein, 103 aa, Artificial Sequence
  Description of Artificial Sequence: Synthetic polypeptide
  MISC_FEATURE (1)..(2): May or may not be present
  MISC_FEATURE (3)..(3): Val, Ala or Gly
  MISC_FEATURE (18)..(18): Arg or Thr
  MISC_FEATURE (20)..(20): Thr or Ile
  MISC_FEATURE (37)..(37): Lys or Arg
  MISC_FEATURE (65)..(65): Ser or Trp
  MISC_FEATURE (70)..(70): Thr or Asn
  MISC_FEATURE (75)..(75): Ser or Asn
  MISC_FEATURE (94)..(94): Pro or Gln
EIXLTQSPGTLSLSPGEXAXISCRTSQYGSLAWYQQXPGQAPRLVIYSGSTRAAGIPDRFSGSRXGPDYXLTISXLESGDFGVYYCQQYEFFGXGTKVQVDIK

SEQ ID NO: 45 - protein, 6 aa, Artificial Sequence
  Description of Artificial Sequence: Synthetic peptide
TNNAKT

SEQ ID NO: 46 - protein, 4 aa, Artificial Sequence
  Description of Artificial Sequence: Synthetic peptide
SGGD

SEQ ID NO: 47 - protein, 5 aa, Artificial Sequence
  Description of Artificial Sequence: Synthetic peptide
TRDGG

SEQ ID NO: 48 - protein, 15 aa, Artificial Sequence
  Description of Artificial Sequence: Synthetic peptide
GGGGSGGGGSGGGGS

SEQ ID NO: 49 - DNA, 18 bp, Artificial Sequence
  Description of Artificial Sequence: Synthetic oligonucleotide
  misc_feature (1)..(18): This sequence may encompass 12 to 18 nucleotides
tttttttttttttttttt

SEQ ID NO: 50 - protein, 103 aa, Artificial Sequence
  Description of Artificial Sequence: Synthetic polypeptide
EIVLTQSPGTLSLSPGETATISCRTSQYGSLAWYQQRPGQAPRLVIYSGSTRAAGIPDRFSGSRSGPDYTLTISNLESGDFGVYYCQQYEFFGQGTKVQQDNK

SEQ ID NO: 51 - protein, 103 aa, Artificial Sequence
  Description of Artificial Sequence: Synthetic polypeptide
EIVLTQSPGTLSLSPGERATISCRTSQYGSLAWYQQKPGQAPRLVIYSGSTRAAGIPDRFSGSRSGPDYTLTISSLESGDFGVYYCQQYEFFGPGTKVQVDIK

SEQ ID NO: 52 - protein, 103 aa, Artificial Sequence
  Description of Artificial Sequence: Synthetic polypeptide
EIVLTQSPGTLSLSPGETAIISCRTSQYGSLAWYQQRPGQAPRLVIYSGSTRAAGIPDRFSGSRWGPDYNLTISNLESGDFGVYYCQQYEFFGQGTKVQVDIK

SEQ ID NO: 53 - protein, 101 aa, Artificial Sequence
  Description of Artificial Sequence: Synthetic polypeptide
VLTQSPGTLSLSPGETAIISCRTSQYGSLAWYQQRPGQAPRLVIYSGSTRAAGIPDRFSGSRWGPDYNLTISNLESGDFGVYYCQQYEFFGQGTKVQVDIK

SEQ ID NO: 54 - protein, 101 aa, Artificial Sequence
  Description of Artificial Sequence: Synthetic polypeptide
VLTQSPGTLSLSPGETAIISCRTSQYGSLAWYQQRPGQAPRLVIYSGSTRAAGIPDRFSGSRWGPDYTLTISNLESGDFGVYYCQQYEFFGQGTKVQVDIK

SEQ ID NO: 55 - protein, 103 aa, Artificial Sequence; identical to SEQ ID NO: 50
  Description of Artificial Sequence: Synthetic polypeptide

SEQ ID NO: 56 - protein, 101 aa, Artificial Sequence
  Description of Artificial Sequence: Synthetic polypeptide
VLTQSPGTLSLSPGETATISCRTSQYGSLAWYQQRPGQAPRLVIYSGSTRAAGIPDRFSGSRSGPDYTLTISNLESGDFGVYYCQQYEFFGQGTKVQQDNK

SEQ ID NO: 57 - DNA, 1425 bp, Artificial Sequence
  Description of Artificial Sequence: Synthetic polynucleotide
atgggatggtcatgtatcatcctttttctagtagcaactgcaaccggtgtacattcccaggtgcgactgtcgcagtctggaggtcagatgaagaagcctggcgactcgatgagaatttcttgtcgggcttcgggatacgaatttattaattgtccaataaattggattcggctggcccccggaaaaaggcctgagtggatgggatggatgaagcctagggggggggccgtcaattacgcacgtcaacttcagggcagagtgaccatgactcgagacatgtattccgagacagcctttttggagctccgttccttgacatccgacgacacggccgtctatttttgtactcggggaaaatattgcactgcgcgcgactattataattgggacttcgaacactggggccagggcaccccggtcaccgtctcgtcagcgtcgaccaagggcccatcggtcttccccctggcaccctcctccaagagcacctctgggggcacagcggccctgggctgcctggtcaaggactacttccccgaacccgtgacggtgtcgtggaactcaggcgccctgaccagcggcgtgcacaccttcccggctgtcctacagtcctcaggactctactccctcagcagcgtggtgaccgtgccctccagcagcttgggcacccagacctacatctgcaacgtgaatcacaagcccagcaacaccaaggtggacaagaaagttgagcccaaatcttgtgacaaaactcacacatgcccaccgtgcccagcacctgaactcctggggggaccgtcagtcttcctcttccccccaaaacccaaggacaccctcatgatctcccggacccctgaggtcacatgcgtggtggtggacgtgagccacgaagaccctgaggtcaagttcaactggtacgtggacggcgtggaggtgcataatgccaagacaaagccgcgggaggagcagtacaacagcacgtaccgtgtggtcagcgtcctcaccgtcctgcaccaggactggctgaatggcaaggagtacaagtgcaaggtctccaacaaagccctcccagcccccatcgagaaaaccatctccaaagccaaagggcagccccgagaaccacaggtgtacaccctgcccccatcccgggatgagctgaccaagaaccaggtcagcctgacctgcctggtcaaaggcttctatcccagcgacatcgccgtggagtgggagagcaatgggcagccggagaacaactacaagaccacgcctcccgtgctggactccgacggctccttcttcctctacagcaagctcaccgtggacaagagcaggtggcagcaggggaacgtcttctcatgctccgtgatgcatgaggctctgcacaaccactacacgcagaagagcctctccctgtctccgggtaaatga

SEQ ID NO: 58 - DNA, 5838 bp, Artificial Sequence
  Description of Artificial Sequence: Synthetic polynucleotide
tcgcgcgtttcggtgatgacggtgaaaacctctgacacatgcagctcccggagacggtcacagcttgtctgtaagcggatgccgggagcagacaagcccgtcagggcgcgtcagcgggtgttggcgggtgtcggggctggcttaactatgcggcatcagagcagattgtactgagagtgcaccatatgcggtgtgaaataccgcacagatgcgtaaggagaaaataccgcatcagattggctattggccattgcatacgttgtatccatatcataatatgtacatttatattggctcatgtccaacattaccgccatgttgacattgattattgactagttattaatagtaatcaattacggggtcattagttcatagcccatatatggagttccgcgttacataacttacggtaaatggcccgcctggctgaccgcccaacgacccccgcccattgacgtcaataatgacgtatgttcccatagtaacgccaatagggactttccattgacgtcaatgggtggagtatttacggtaaactgcccacttggcagtacatcaagtgtatcatatgccaagtacgccccctattgacgtcaatgacggtaaatggcccgcctggcattatgcccagtacatgaccttatgggactttcctacttggcagtacatctacgtattagtcatcgctattaccatggtgatgcggttttggcagtacatcaatgggcgtggatagcggtttgactcacggggatttccaagtctccaccccattgacgtcaatgggagtttgttttggcaccaaaatcaacgggactttccaaaatgtcgtaacaactccgccccattgacgcaaatgggcggtaggcgtgtacggtgggaggtctatataagcagagctcgtttagtgaaccgtcagatcgcctggagacgccatccacgctgttttgacctccatagaagacaccgggaccgatccagcctccatcggctcgcatctctccttcacgcgcccgccgccctacctgaggccgccatccacgccggttgagtcgcgttctgccgcctcccgcctgtggtgcctcctgaactgcgtccgccgtctaggtaagtttaaagctcaggtcgagaccgggcctttgtccggcgctcccttggagcctacctagactcagccggctctccacgctttgcctgaccctgcttgctcaactctagttaacggtggagggcagtgtagtctgagcagtactcgttgctgccgcgcgcgccaccagacataatagctgacagactaacagactgttcctttccatgggtcttttctgcagtcaccgtcctcgacacgtgtgatcagatatcgcggccgctctagaccaccatgggatggtcatgtatcatcctttttctagtagcaactgcaaccggtgtacattcccaggtgcgactgtcgcagtctggaggtcagatgaagaagcctggcgactcgatgagaatttcttgtcgggcttcgggatacgaatttattaattgtccaataaattggattcggctggcccccggaaaaaggcctgagtggatgggatggatgaagcctagggggggggccgtcaattacgcacgtcaacttcagggcagagtgaccatgactcgagacatgtattccgagacagcctttttggagctccgttccttgacatccgacgacacggccgtctatttttgtactcggggaaaatattgcactgcgcgcgactattataattgggacttcgaacactggggccagggcaccccggtcaccgtctcgtcagcgtcgaccaagggcccatcggtcttccccctggcaccctcctccaagagcacctctgggggcacagcggccctgggctgcctggtcaaggactacttccccgaacccgtgacggtgtcgtggaactcaggcgccctgaccagcggcgtgcacaccttcccggctgtcctacagtcctcaggactctactccctcagcagcgtggtgaccgtgccctccagcagcttgggcacccagacctacatctgcaacgtgaatcacaagcccagcaacaccaaggtggacaagaaagttgagcccaaatcttgtgacaaaactcacacatgcccaccgtgcccagcacctgaactcctggggggaccgtcagtcttcctcttccccccaaaacccaaggacaccctcatgatctcccggacccctgaggtcacatgcgtggtggtggacgtgagccacgaagaccctgaggtcaagttcaactggtacgtggacggcgtggaggtgcataatgccaagacaaagccgcgggaggagcagtacaacagcacgtaccgtgtggtcagcgtcctcaccgtcctgcaccaggactggctgaatggcaaggagtacaagtgcaaggtctccaacaaagccctcccagcccccatcgagaaaaccatctccaaagccaaagggcagccccgagaaccacaggtgtacaccctgcccccatcccgggatgagctgaccaagaaccaggtcagcctgacctgcctggtcaaaggcttctatcccagcgacatcgccgtggagtgggagagcaatgggcagccggagaacaactacaagaccacgcctcccgtgctggactccgacggctccttcttcctctacagcaagctcaccgtggacaagagcaggtggcagcaggggaacgtcttctcatgctccgtgatgcatgaggctctgcacaaccactacacgcagaagagcctctccctgtctccgggtaaatgatgaggatccagatctgctgtgccttctagttgccagccatctgttgtttgcccctcccccgtgccttccttgaccctggaaggtgccactcccactgtcctttcctaataaaatgaggaaattgcatcgcattgtctgagtaggtgtcattctattctggggggtggggtggggcaggacagcaagggggaggattgggaagacaatagcaggcatgctggggatgcggtgggctctatgggtacccaggtgctgaagaattgacccggttcctcctgggccagaaagaagcaggcacatccccttctctgtgacacaccctgtccacgcccctggttcttagttccagccccactcataggacactcatagctcaggagggctccgccttcaatcccacccgctaaagtacttggagcggtctctccctccctcatcagcccaccaaaccaaacctagcctccaagagtgggaagaaattaaagcaagataggctattaagtgcagagggagagaaaatgcctccaacatgtgaggaagtaatgagagaaatcatagaattttaaggccatgatttaaggccatcatggccttaatcttccgcttcctcgctcactgactcgctgcgctcggtcgttcggctgcggcgagcggtatcagctcactcaaaggcggtaatacggttatccacagaatcaggggataacgcaggaaagaacatgtgagcaaaaggccagcaaaaggccaggaaccgtaaaaaggccgcgttgctggcgtttttccataggctccgcccccctgacgagcatcacaaaaatcgacgctcaagtcagaggtggcgaaacccgacaggactataaagataccaggcgtttccccctggaagctccctcgtgcgctctcctgttccgaccctgccgcttaccggatacctgtccgcctttctcccttcgggaagcgtggcgctttctcatagctcacgctgtaggtatctcagttcggtgtaggtcgttcgctccaagctgggctgtgtgcacgaaccccccgttcagcccgaccgctgcgccttatccggtaactatcgtcttgagtccaacccggtaagacacgacttatcgccactggcagcagccactggtaacaggattagcagagcgaggtatgtaggcggtgctacagagttcttgaagtggtggcctaactacggctacactagaagaacagtatttggtatctgcgctctgctgaagccagttaccttcggaaaaagagttggtagctcttgatccggcaaacaaaccaccgctggtagcggtggtttttttgtttgcaagcagcagattacgcgcagaaaaaaaggatctcaagaagatcctttgatcttttctacggggtctgacgctcagtggaacgaaaactcacgttaagggattttggtcatgagattatcaaaaaggatcttcacctagatccttttaaattaaaaatgaagttttaaatcaatctaaagtatatatgagtaaacttggtctgacagttaccaatgcttaatcagtgaggcacctatctcagcgatctgtctatttcgttcatccatagttgcctgactcggggggggggggcgctgaggtctgcctcgtgaagaaggtgttgctgactcataccaggcctgaatcgccccatcatccagccagaaagtgagggagccacggttgatgagagctttgttgtaggtggaccagttggtgattttgaacttttgctttgccacggaacggtctgcgttgtcgggaagatgcgtgatctgatccttcaactcagcaaaagttcgatttattcaacaaagccgccgtcccgtcaagtcagcgtaatgctctgccagtgttacaaccaattaaccaattctgattagaaaaactcatcgagcatcaaatgaaactgcaatttattcatatcaggattatcaataccatatttttgaaaaagccgtttctgtaatgaaggagaaaactcaccgaggcagttccataggatggcaagatcctggtatcggtctgcgattccgactcgtccaacatcaatacaacctattaatttcccctcgtcaaaaataaggttatcaagtgagaaatcaccatgagtgacgactgaatccggtgagaatggcaaaagcttatgcatttctttccagacttgttcaacaggccagccattacgctcgtcatcaaaatcactcgcatcaaccaaaccgttattcattcgtgattgcgcctgagcgagacgaaatacgcgatcgctgttaaaaggacaattacaaacaggaatcgaatgcaaccggcgcaggaacactgccagcgcatcaacaatattttcacctgaatcaggatattcttctaatacctggaatgctgttttcccggggatcgcagtggtgagtaaccatgcatcatcaggagtacggataaaatgcttgatggtcggaagaggcataaattccgtcagccagtttagtctgaccatctcatctgtaacatcattggcaacgctacctttgccatgtttcagaaacaactctggcgcatcgggcttcccatacaatcgatagattgtcgcacctgattgcccgacattatcgcgagcccatttatacccatataaatcagcatccatgttggaatttaatcgcggcctcgagcaagacgtttcccgttgaatatggctcataacaccccttgtattactgtttatgtaagcagacagttttattgttcatgatgatatatttttatcttgtgcaatgtaacatcagagattttgagacacaacgtggctttccccccccccccattattgaagcatttatcagggttattgtctcatgagcggatacatatttgaatgtatttagaaaaataaacaaataggggttccgcgcacatttccccgaaaagtgccacctgacgtctaagaaaccattattatcatgacattaacctataaaaataggcgtatcacgaggccctttcgtc

SEQ ID NO: 59 - DNA, 1425 bp, Artificial Sequence
  Description of Artificial Sequence: Synthetic polynucleotide
atgggatggtcatgtatcatcctttttctagtagcaactgcaaccggtgtacattcccaggtccagctgagccagagcggggggcagatgaaaaagccaggagatagcatgagggtgtcttgtaaagcaagcgggtatgagtttatcaactgcccaattaattgggtgcggctggcaccaggacagagacctgagtggatgggatggatgaagccacgagggggagccgtgagctacgctaggcagctgcagggacgcgtcaccatgacacgagacatgtacagctccaccgcttatctggagctgcggagactgacatctgacgatactgcagtctactattgcgccaggggcaaatattgtacagcacgcgactactataactgggatttcgaacactggggacagggaactcccgtgaccgtctctagtccgtcgaccaagggcccatcggtcttccccctggcaccctcctccaagagcacctctgggggcacagcggccctgggctgcctggtcaaggactacttccccgaacccgtgacggtgtcgtggaactcaggcgccctgaccagcggcgtgcacaccttcccggctgtcctacagtcctcaggactctactccctcagcagcgtggtgaccgtgccctccagcagcttgggcacccagacctacatctgcaacgtgaatcacaagcccagcaacaccaaggtggacaagaaagttgagcccaaatcttgtgacaaaactcacacatgcccaccgtgcccagcacctgaactcctggggggaccgtcagtcttcctcttccccccaaaacccaaggacaccctcatgatctcccggacccctgaggtcacatgcgtggtggtggacgtgagccacgaagaccctgaggtcaagttcaactggtacgtggacggcgtggaggtgcataatgccaagacaaagccgcgggaggagcagtacaacagcacgtaccgtgtggtcagcgtcctcaccgtcctgcaccaggactggctgaatggcaaggagtacaagtgcaaggtctccaacaaagccctcccagcccccatcgagaaaaccatctccaaagccaaagggcagccccgagaaccacaggtgtacaccctgcccccatcccgggatgagctgaccaagaaccaggtcagcctgacctgcctggtcaaaggcttctatcccagcgacatcgccgtggagtgggagagcaatgggcagccggagaacaactacaagaccacgcctcccgtgctggactccgacggctccttcttcctctacagcaagctcaccgtggacaagagcaggtggcagcaggggaacgtcttctcatgctccgtgatgcatgaggctctgcacaaccactacacgcagaagagcctctccctgtctccgggtaaatga

SEQ ID NO: 60 - DNA, 5838 bp, Artificial Sequence
  Description of Artificial Sequence: Synthetic polynucleotide
tcgcgcgtttcggtgatgacggtgaaaacctctgacacatgcagctcccggagacggtcacagcttgtctgtaagcggatgccgggagcagacaagcccgtcagggcgcgtcagcgggtgttggcgggtgtcggggctggcttaactatgcggcatcagagcagattgtactgagagtgcaccatatgcggtgtgaaataccgcacagatgcgtaaggagaaaataccgcatcagattggctattggccattgcatacgttgtatccatatcataatatgtacatttatattggctcatgtccaacattaccgccatgttgacattgattattgactagttattaatagtaatcaattacggggtcattagttcatagcccatatatggagttccgcgttacataacttacggtaaatggcccgcctggctgaccgcccaacgacccccgcccattgacgtcaataatgacgtatgttcccatagtaacgccaatagggactttccattgacgtcaatgggtggagtatttacggtaaactgcccacttggcagtacatcaagtgtatcatatgccaagtacgccccctattgacgtcaatgacggtaaatggcccgcctggcattatgcccagtacatgaccttatgggactttcctacttggcagtacatctacgtattagtcatcgctattaccatggtgatgcggttttggcagtacatcaatgggcgtggatagcggtttgactcacggggatttccaagtctccaccccattgacgtcaatgggagtttgttttggcaccaaaatcaacgggactttccaaaatgtcgtaacaactccgccccattgacgcaaatgggcggtaggcgtgtacggtgggaggtctatataagcagagctcgtttagtgaaccgtcagatcgcctggagacgccatccacgctgttttgacctccatagaagacaccgggaccgatccagcctccatcggctcgcatctctccttcacgcgcccgccgccctacctgaggccgccatccacgccggttgagtcgcgttctgccgcctcccgcctgtggtgcctcctgaactgcgtccgccgtctaggtaagtttaaagctcaggtcgagaccgggcctttgtccggcgctcccttggagcctacctagactcagccggctctccacgctttgcctgaccctgcttgctcaactctagttaacggtggagggcagtgtagtctgagcagtactcgttgctgccgcgcgcgccaccagacataatagctgacagactaacagactgttcctttccatgggtcttttctgcagtcaccgtcctcgacacgtgtgatcagatatcgcggccgctctagaccaccatgggatggtcatgtatcatcctttttctagtagcaactgcaaccggtgtacattcccaggtccagctgagccagagcggggggcagatgaaaaagccaggagatagcatgagggtgtcttgtaaagcaagcgggtatgagtttatcaactgcccaattaattgggtgcggctggcaccaggacagagacctgagtggatgggatggatgaagccacgagggggagccgtgagctacgctaggcagctgcagggacgcgtcaccatgacacgagacatgtacagctccaccgcttatctggagctgcggagactgacatctgacgatactgcagtctactattgcgccaggggcaaatattgtacagcacgcgactactataactgggatttcgaacactggggacagggaactcccgtgaccgtctctagtccgtcgaccaagggcccatcggtcttccccctggcaccctcctccaagagcacctctgggggcacagcggccctgggctgcctggtcaaggactacttccccgaacccgtgacggtgtcgtggaactcaggcgccctgaccagcggcgtgcacaccttcccggctgtcctacagtcctcaggactctactccctcagcagcgtggtgaccgtgccctccagcagcttgggcacccagacctacatctgcaacgtgaatcacaagcccagcaacaccaaggtggacaagaaagttgagcccaaatcttgtgacaaaactcacacatgcccaccgtgcccagcacctgaactcctggggggaccgtcagtcttcctcttccccccaaaacccaaggacaccctcatgatctcccggacccctgaggtcacatgcgtggtggtggacgtgagccacgaagaccctgaggtcaagttcaactggtacgtggacggcgtggaggtgcataatgccaagacaaagccgcgggaggagcagtacaacagcacgtaccgtgtggtcagcgtcctcaccgtcctgcaccaggactggctgaatggcaaggagtacaagtgcaaggtctccaacaaagccctcccagcccccatcgagaaaaccatctccaaagccaaagggcagccccgagaaccacaggtgtacaccctgcccccatcccgggatgagctgaccaagaaccaggtcagcctgacctgcctggtcaaaggcttctatcccagcgacatcgccgtggagtgggagagcaatgggcagccggagaacaactacaagaccacgcctcccgtgctggactccgacggctccttcttcctctacagcaagctcaccgtggacaagagcaggtggcagcaggggaacgtcttctcatgctccgtgatgcatgaggctctgcacaaccactacacgcagaagagcctctccctgtctccgggtaaatgatgaggatccagatctgctgtgccttctagttgccagccatctgttgtttgcccctcccccgtgccttccttgaccctggaaggtgccactcccactgtcctttcctaataaaatgaggaaattgcatcgcattgtctgagtaggtgtcattctattctggggggtggggtggggcaggacagcaagggggaggattgggaagacaatagcaggcatgctggggatgcggtgggctctatgggtacccaggtgctgaagaattgacccggttcctcctgggccagaaagaagcaggcacatccccttctctgtgacacaccctgtccacgcccctggttcttagttccagccccactcataggacactcatagctcaggagggctccgccttcaatcccacccgctaaagtacttggagcggtctctccctccctcatcagcccaccaaaccaaacctagcctccaagagtgggaagaaattaaagcaagataggctattaagtgcagagggagagaaaatgcctccaacatgtgaggaagtaatgagagaaatcatagaattttaaggccatgatttaaggccatcatggccttaatcttccgcttcctcgctcactgactcgctgcgctcggtcgttcggctgcggcgagcggtatcagctcactcaaaggcggtaatacggttatccacagaatcaggggataacgcaggaaagaacatgtgagcaaaaggccagcaaaaggccaggaaccgtaaaaaggccgcgttgctggcgtttttccataggctccgcccccctgacgagcatcacaaaaatcgacgctcaagtcagaggtggcgaaacccgacaggactataaagataccaggcgtttccccctggaagctccctcgtgcgctctcctgttccgaccctgccgcttaccggatacctgtccgcctttctcccttcgggaagcgtggcgctttctcatagctcacgctgtaggtatctcagttcggtgtaggtcgttcgctccaagctgggctgtgtgcacgaaccccccgttcagcccgaccgctgcgccttatccggtaactatcgtcttgagtccaacccggtaagacacgacttatcgccactggcagcagccactggtaacaggattagcagagcgaggtatgtaggcggtgctacagagttcttgaagtggtggcctaactacggctacactagaagaacagtatttggtatctgcgctctgctgaagccagttaccttcggaaaaagagttggtagctcttgatccggcaaacaaaccaccgctggtagcggtggtttttttgtttgcaagcagcagattacgcgcagaaaaaaaggatctcaagaagatcctttgatcttttctacggggtctgacgctcagtggaacgaaaactcacgttaagggattttggtcatgagattatcaaaaaggatcttcacctagatccttttaaattaaaaatgaagttttaaatcaatctaaagtatatatgagtaaacttggtctgacagttaccaatgcttaatcagtgaggcacctatctcagcgatctgtctatttcgttcatccatagttgcctgactcggggggggggggcgctgaggtctgcctcgtgaagaaggtgttgctgactcataccaggcctgaatcgccccatcatccagccagaaagtgagggagccacggttgatgagagctttgttgtaggtggaccagttggtgattttgaacttttgctttgccacggaacggtctgcgttgtcgggaagatgcgtgatctgatccttcaactcagcaaaagttcgatttattcaacaaagccgccgtcccgtcaagtcagcgtaatgctctgccagtgttacaaccaattaaccaattctgattagaaaaactcatcgagcatcaaatgaaactgcaatttattcatatcaggattatcaataccatatttttgaaaaagccgtttctgtaatgaaggagaaaactcaccgaggcagttccataggatggcaagatcctggtatcggtctgcgattccgactcgtccaacatcaatacaacctattaatttcccctcgtcaaaaataaggttatcaagtgagaaatcaccatgagtgacgactgaatccggtgagaatggcaaaagcttatgcatttctttccagacttgttcaacaggccagccattacgctcgtcatcaaaatcactcgcatcaaccaaaccgttattcattcgtgattgcgcctgagcgagacgaaatacgcgatcgctgttaaaaggacaattacaaacaggaatcgaatgcaaccggcgcaggaacactgccagcgcatcaacaatattttcacctgaatcaggatattcttctaatacctggaatgctgttttcccggggatcgcagtggtgagtaaccatgcatcatcaggagtacggataaaatgcttgatggtcggaagaggcataaattccgtcagccagtttagtctgaccatctcatctgtaacatcattggcaacgctacctttgccatgtttcagaaacaactctggcgcatcgggcttcccatacaatcgatagattgtcgcacctgattgcccgacattatcgcgagcccatttatacccatataaatcagcatccatgttggaatttaatcgcggcctcgagcaagacgtttcccgttgaatatggctcataacaccccttgtattactgtttatgtaagcagacagttttattgttcatgatgatatatttttatcttgtgcaatgtaacatcagagattttgagacacaacgtggctttccccccccccccattattgaagcatttatcagggttattgtctcatgagcggatacatatttgaatgtatttagaaaaataaacaaataggggttccgcgcacatttccccgaaaagtgccacctgacgtctaagaaaccattattatcatgacattaacctataaaaataggcgtatcacgaggccctttcgtc

SEQ ID NO: 61 - DNA, 1425 bp, Artificial Sequence
  Description of Artificial Sequence: Synthetic polynucleotide
atgggatggtcatgtatcatcctttttctagtagcaactgcaaccggtgtacattcccaggtgcagctgagccagagcggcggacagatgaaaaagccaggcgattctatgcggatttcttgtaaagccagcggatacgagttcatcaactgcccaattaattgggtgcgcctggcaccaggacagcgacctgagtggatgggatggatgaagccacgagggggagccgtgtcttacgctcgacagctgcagggaagagtcaccatgacaagggacatgtacagctccaccgcttatctggagctgaggtcactgacaagcgacgatactgcagtctactattgcgcccggggcaaatattgtacagcaagagactactataactgggatttcgaacactggggacagggaactcccgtgaccgtctctagtccgtcgaccaagggcccatcggtcttccccctggcaccctcctccaagagcacctctgggggcacagcggccctgggctgcctggtcaaggactacttccccgaacccgtgacggtgtcgtggaactcaggcgccctgaccagcggcgtgcacaccttcccggctgtcctacagtcctcaggactctactccctcagcagcgtggtgaccgtgccctccagcagcttgggcacccagacctacatctgcaacgtgaatcacaagcccagcaacaccaaggtggacaagaaagttgagcccaaatcttgtgacaaaactcacacatgcccaccgtgcccagcacctgaactcctggggggaccgtcagtcttcctcttccccccaaaacccaaggacaccctcatgatctcccggacccctgaggtcacatgcgtggtggtggacgtgagccacgaagaccctgaggtcaagttcaactggtacgtggacggcgtggaggtgcataatgccaagacaaagccgcgggaggagcagtacaacagcacgtaccgtgtggtcagcgtcctcaccgtcctgcaccaggactggctgaatggcaaggagtacaagtgcaaggtctccaacaaagccctcccagcccccatcgagaaaaccatctccaaagccaaagggcagccccgagaaccacaggtgtacaccctgcccccatcccgggatgagctgaccaagaaccaggtcagcctgacctgcctggtcaaaggcttctatcccagcgacatcgccgtggagtgggagagcaatgggcagccggagaacaactacaagaccacgcctcccgtgctggactccgacggctccttcttcctctacagcaagctcaccgtggacaagagcaggtggcagcaggggaacgtcttctcatgctccgtgatgcatgaggctctgcacaaccactacacgcagaagagcctctccctgtctccgggtaaatga

SEQ ID NO: 62 - DNA, 5838 bp, Artificial Sequence
  Description of Artificial Sequence: Synthetic polynucleotide
tcgcgcgtttcggtgatgacggtgaaaacctctgacacatgcagctcccggagacggtcacagcttgtctgtaagcggatgccgggagcagacaagcccgtcagggcgcgtcagcgggtgttggcgggtgtcggggctggcttaactatgcggcatcagagcagattgtactgagagtgcaccatatgcggtgtgaaataccgcacagatgcgtaaggagaaaataccgcatcagattggctattggccattgcatacgttgtatccatatcataatatgtacatttatattggctcatgtccaacattaccgccatgttgacattgattattgactagttattaatagtaatcaattacggggtcattagttcatagcccatatatggagttccgcgttacataacttacggtaaatggcccgcctggctgaccgcccaacgacccccgcccattgacgtcaataatgacgtatgttcccatagtaacgccaatagggactttccattgacgtcaatgggtggagtatttacggtaaactgcccacttggcagtacatcaagtgtatcatatgccaagtacgccccctattgacgtcaatgacggtaaatggcccgcctggcattatgcccagtacatgaccttatgggactttcctacttggcagtacatctacgtattagtcatcgctattaccatggtgatgcggttttggcagtacatcaatgggcgtggatagcggtttgactcacggggatttccaagtctccaccccattgacgtcaatgggagtttgttttggcaccaaaatcaacgggactttccaaaatgtcgtaacaactccgccccattgacgcaaatgggcggtaggcgtgtacggtgggaggtctatataagcagagctcgtttagtgaaccgtcagatcgcctggagacgccatccacgctgttttgacctccatagaagacaccgggaccgatccagcctccatcggctcgcatctctccttcacgcgcccgccgccctacctgaggccgccatccacgccggttgagtcgcgttctgccgcctcccgcctgtggtgcctcctgaactgcgtccgccgtctaggtaagtttaaagctcaggtcgagaccgggcctttgtccggcgctcccttggagcctacctagactcagccggctctccacgctttgcctgaccctgcttgctcaactctagttaacggtggagggcagtgtagtctgagcagtactcgttgctgccgcgcgcgccaccagacataatagctgacagactaacagactgttcctttccatgggtcttttctgcagtcaccgtcctcgacacgtgtgatcagatatcgcggccgctctagaccaccatgggatggtcatgtatcatcctttttctagtagcaactgcaaccggtgtacattcccaggtgcagctgagccagagcggcggacagatgaaaaagccaggcgattctatgcggatttcttgtaaagccagcggatacgagttcatcaactgcccaattaattgggtgcgcctggcaccaggacagcgacctgagtggatgggatggatgaagccacgagggggagccgtgtcttacgctcgacagctgcagggaagagtcaccatgacaagggacatgtacagctccaccgcttatctggagctgaggtcactgacaagcgacgatactgcagtctactattgcgcccggggcaaatattgtacagcaagagactactataactgggatttcgaacactggggacagggaactcccgtgaccgtctctagtccgtcgaccaagggcccatcggtcttccccctggcaccctcctccaagagcacctctgggggcacagcggccctgggctgcctggtcaaggactacttccccgaacccgtgacggtgtcgtggaactcaggcgccctgaccagcggcgtgcacaccttcccggctgtcctacagtcctcaggactctactccctcagcagcgtggtgaccgtgccctccagcagcttgggcacccagacctacatctgcaacgtgaatcacaagcccagcaacaccaaggtggacaagaaagttgagcccaaatcttgtgacaaaactcacacatgcccaccgtgcccagcacctgaactcctggggggaccgtcagtcttcctcttccccccaaaacccaaggacaccctcatgatctcccggacccctgaggtcacatgcgtggtggtggacgtgagccacgaagaccctgaggtcaagttcaactggtacgtggacggcgtggaggtgcataatgccaagacaaagccgcgggaggagcagtacaacagcacgtaccgtgtggtcagcgtcctcaccgtcctgcaccaggactggctgaatggcaaggagtacaagtgcaaggtctccaacaaagccctcccagcccccatcgagaaaaccatctccaaagccaaagggcagccccgagaaccacaggtgtacaccctgcccccatcccgggatgagctgaccaagaaccaggtcagcctgacctgcctggtcaaaggcttctatcccagcgacatcgccgtggagtgggagagcaatgggcagccggagaacaactacaagaccacgcctcccgtgctggactccgacggctccttcttcctctacagcaagctcaccgtggacaagagcaggtggcagcaggggaacgtcttctcatgctccgtgatgcatgaggctctgcacaaccactacacgcagaagagcctctccctgtctccgggtaaatgatgaggatccagatctgctgtgccttctagttgccagccatctgttgtttgcccctcccccgtgccttccttgaccctggaaggtgccactcccactgtcctttcctaataaaatgaggaaattgcatcgcattgtctgagtaggtgtcattctattctggggggtggggtggggcaggacagcaagggggaggattgggaagacaatagcaggcatgctggggatgcggtgggctctatgggtacccaggtgctgaagaattgacccggttcctcctgggccagaaagaagcaggcacatccccttctctgtgacacaccctgtccacgcccctggttcttagttccagccccactcataggacactcatagctcaggagggctccgccttcaatcccacccgctaaagtacttggagcggtctctccctccctcatcagcccaccaaaccaaacctagcctccaagagtgggaagaaattaaagcaagataggctattaagtgcagagggagagaaaatgcctccaacatgtgaggaagtaatgagagaaatcatagaattttaaggccatgatttaaggccatcatggccttaatcttccgcttcctcgctcactgactcgctgcgctcggtcgttcggctgcggcgagcggtatcagctcactcaaaggcggtaatacggttatccacagaatcaggggataacgcaggaaagaacatgtgagcaaaaggccagcaaaaggccaggaaccgtaaaaaggccgcgttgctggcgtttttccataggctccgcccccctgacgagcatcacaaaaatcgacgctcaagtcagaggtggcgaaacccgacaggactataaagataccaggcgtttccccctggaagctccctcgtgcgctctcctgttccgaccctgccgcttaccggatacctgtccgcctttctcccttcgggaagcgtggcgctttctcatagctcacgctgtaggtatctcagttcggtgtaggtcgttcgctccaagctgggctgtgtgcacgaaccccccgttcagcccgaccgctgcgccttatccggtaactatcgtcttgagtccaacccggtaagacacgacttatcgccactggcagcagccactggtaacaggattagcagagcgaggtatgtaggcggtgctacagagttcttgaagtggtggcctaactacggctacactagaagaacagtatttggtatctgcgctctgctgaagccagttaccttcggaaaaagagttggtagctcttgatccggcaaacaaaccaccgctggtagcggtggtttttttgtttgcaagcagcagattacgcgcagaaaaaaaggatctcaagaagatcctttgatcttttctacggggtctgacgctcagtggaacgaaaactcacgttaagggattttggtcatgagattatcaaaaaggatcttcacctagatccttttaaattaaaaatgaagttttaaatcaatctaaagtatatatgagtaaacttggtctgacagttaccaatgcttaatcagtgaggcacctatctcagcgatctgtctatttcgttcatccatagttgcctgactcggggggggggggcgctgaggtctgcctcgtgaagaaggtgttgctgactcataccaggcctgaatcgccccatcatccagccagaaagtgagggagccacggttgatgagagctttgttgtaggtggaccagttggtgattttgaacttttgctttgccacggaacggtctgcgttgtcgggaagatgcgtgatctgatccttcaactcagcaaaagttcgatttattcaacaaagccgccgtcccgtcaagtcagcgtaatgctctgccagtgttacaaccaattaaccaattctgattagaaaaactcatcgagcatcaaatgaaactgcaatttattcatatcaggattatcaataccatatttttgaaaaagccgtttctgtaatgaaggagaaaactcaccgaggcagttccataggatggcaagatcctggtatcggtctgcgattccgactcgtccaacatcaatacaacctattaatttcccctcgtcaaaaataaggttatcaagtgagaaatcaccatgagtgacgactgaatccggtgagaatggcaaaagcttatgcatttctttccagacttgttcaacaggccagccattacgctcgtcatcaaaatcactcgcatcaaccaaaccgttattcattcgtgattgcgcctgagcgagacgaaatacgcgatcgctgttaaaaggacaattacaaacaggaatcgaatgcaaccggcgcaggaacactgccagcgcatcaacaatattttcacctgaatcaggatattcttctaatacctggaatgctgttttcccggggatcgcagtggtgagtaaccatgcatcatcaggagtacggataaaatgcttgatggtcggaagaggcataaattccgtcagccagtttagtctgaccatctcatctgtaacatcattggcaacgctacctttgccatgtttcagaaacaactctggcgcatcgggcttcccatacaatcgatagattgtcgcacctgattgcccgacattatcgcgagcccatttatacccatataaatcagcatccatgttggaatttaatcgcggcctcgagcaagacgtttcccgttgaatatggctcataacaccccttgtattactgtttatgtaagcagacagttttattgttcatgatgatatatttttatcttgtgcaatgtaacatcagagattttgagacacaacgtggctttccccccccccccattattgaagcatttatcagggttattgtctcatgagcggatacatatttgaatgtatttagaaaaataaacaaataggggttccgcgcacatttccccgaaaagtgccacctgacgtctaagaaaccattattatcatgacattaacctataaaaataggcgtatcacgaggccctttcgtc

SEQ ID NO: 63 - DNA, 1425 bp, Artificial Sequence
  Description of Artificial Sequence: Synthetic polynucleotide
atgggatggtcatgtatcatcctttttctagtagcaactgcaaccggtgtacattcccaggtccagctgagccagagcggaggccagatgaagaagccaggagatagtatgaggattagttgtcgagcaagcgggtatgagtttatcaactgcccaattaattgggtgcgcctggcaccaggaaagcgacctgagtggatgggatggatgaaaccacgagggggagccgtgagctacgctcgacagctgcagggaagagtcaccatgacaagggacatgtattctgagaccgctttcctggaactgaggtctctgacaagtgacgatactgcagtctacttttgcgcccggggcaagtattgtacagcaagagactactataactgggatttcgaacactggggacagggaactcccgtgaccgtcagctccccgtcgaccaagggcccatcggtcttccccctggcaccctcctccaagagcacctctgggggcacagcggccctgggctgcctggtcaaggactacttccccgaacccgtgacggtgtcgtggaactcaggcgccctgaccagcggcgtgcacaccttcccggctgtcctacagtcctcaggactctactccctcagcagcgtggtgaccgtgccctccagcagcttgggcacccagacctacatctgcaacgtgaatcacaagcccagcaacaccaaggtggacaagaaagttgagcccaaatcttgtgacaaaactcacacatgcccaccgtgcccagcacctgaactcctggggggaccgtcagtcttcctcttccccccaaaacccaaggacaccctcatgatctcccggacccctgaggtcacatgcgtggtggtggacgtgagccacgaagaccctgaggtcaagttcaactggtacgtggacggcgtggaggtgcataatgccaagacaaagccgcgggaggagcagtacaacagcacgtaccgtgtggtcagcgtcctcaccgtcctgcaccaggactggctgaatggcaaggagtacaagtgcaaggtctccaacaaagccctcccagcccccatcgagaaaaccatctccaaagccaaagggcagccccgagaaccacaggtgtacaccctgcccccatcccgggatgagctgaccaagaaccaggtcagcctgacctgcctggtcaaaggcttctatcccagcgacatcgccgtggagtgggagagcaatgggcagccggagaacaactacaagaccacgcctcccgtgctggactccgacggctccttcttcctctacagcaagctcaccgtggacaagagcaggtggcagcaggggaacgtcttctcatgctccgtgatgcatgaggctctgcacaaccactacacgcagaagagcctctccctgtctccgggtaaatga

SEQ ID NO: 64 - DNA, 5838 bp, Artificial Sequence
  Description of Artificial Sequence: Synthetic polynucleotide
tcgcgcgtttcggtgatgacggtgaaaacctctgacacatgcagctcccggagacggtcacagcttgtctgtaagcggatgccgggagcagacaagcccgtcagggcgcgtcagcgggtgttggcgggtgtcggggctggcttaactatgcggcatcagagcagattgtactgagagtgcaccatatgcggtgtgaaataccgcacagatgcgtaaggagaaaataccgcatcagattggctattggccattgcatacgttgtatccatatcataatatgtacatttatattggctcatgtccaacattaccgccatgttgacattgattattgactagttattaatagtaatcaattacggggtcattagttcatagcccatatatggagttccgcgttacataacttacggtaaatggcccgcctggctgaccgcccaacgacccccgcccattgacgtcaataatgacgtatgttcccatagtaacgccaatagggactttccattgacgtcaatgggtggagtatttacggtaaactgcccacttggcagtacatcaagtgtatcatatgccaagtacgccccctattgacgtcaatgacggtaaatggcccgcctggcattatgcccagtacatgaccttatgggactttcctacttggcagtacatctacgtattagtcatcgctattaccatggtgatgcggttttggcagtacatcaatgggcgtggatagcggtttgactcacggggatttccaagtctccaccccattgacgtcaatgggagtttgttttggcaccaaaatcaacgggactttccaaaatgtcgtaacaactccgccccattgacgcaaatgggcggtaggcgtgtacggtgggaggtctatataagcagagctcgtttagtgaaccgtcagatcgcctggagacgccatccacgctgttttgacctccatagaagacaccgggaccgatccagcctccatcggctcgcatctctccttcacgcgcccgccgccctacctgaggccgccatccacgccggttgagtcgcgttctgccgcctcccgcctgtggtgcctcctgaactgcgtccgccgtctaggtaagtttaaagctcaggtcgagaccgggcctttgtccggcgctcccttggagcctacctagactcagccggctctccacgctttgcctgaccctgcttgctcaactctagttaacggtggagggcagtgtagtctgagcagtactcgttgctgccgcgcgcgccaccagacataatagctgacagactaacagactgttcctttccatgggtcttttctgcagtcaccgtcctcgacacgtgtgatcagatatcgcggccgctctagaccaccatgggatggtcatgtatcatcctttttctagtagcaactgcaaccggtgtacattcccaggtccagctgagccagagcggaggccagatgaagaagccaggagatagtatgaggattagttgtcgagcaagcgggtatgagtttatcaactgcccaattaattgggtgcgcctggcaccaggaaagcgacctgagtggatgggatggatgaaaccacgagggggagccgtgagctacgctcgacagctgcagggaagagtcaccatgacaagggacatgtattctgagaccgctttcctggaactgaggtctctgacaagtgacgatactgcagtctacttttgcgcccggggcaagtattgtacagcaagagactactataactgggatttcgaacactggggacagggaactcccgtgaccgtcagctccccgtcgaccaagggcccatcggtcttccccctggcaccctcctccaagagcacctctgggggcacagcggccctgggctgcctggtcaaggactacttccccgaacccgtgacggtgtcgtggaactcaggcgccctgaccagcggcgtgcacaccttcccggctgtcctacagtcctcaggactctactccctcagcagcgtggtgaccgtgccctccagcagcttgggcacccagacctacatctgcaacgtgaatcacaagcccagcaacaccaaggtggacaagaaagttgagcccaaatcttgtgacaaaactcacacatgcccaccgtgcccagcacctgaactcctggggggaccgtcagtcttcctcttccccccaaaacccaaggacaccctcatgatctcccggacccctgaggtcacatgcgtggtggtggacgtgagccacgaagaccctgaggtcaagttcaactggtacgtggacggcgtggaggtgcataatgccaagacaaagccgcgggaggagcagtacaacagcacgtaccgtgtggtcagcgtcctcaccgtcctgcaccaggactggctgaatggcaaggagtacaagtgcaaggtctccaacaaagccctcccagcccccatcgagaaaaccatctccaaagccaaagggcagccccgagaaccacaggtgtacaccctgcccccatcccgggatgagctgaccaagaaccaggtcagcctgacctgcctggtcaaaggcttctatcccagcgacatcgccgtggagtgggagagcaatgggcagccggagaacaactacaagaccacgcctcccgtgctggactccgacggctccttcttcctctacagcaagctcaccgtggacaagagcaggtggcagcaggggaacgtcttctcatgctccgtgatgcatgaggctctgcacaaccactacacgcagaagagcctctccctgtctccgggtaaatgatgaggatccagatctgctgtgccttctagttgccagccatctgttgtttgcccctcccccgtgccttccttgaccctggaaggtgccactcccactgtcctttcctaataaaatgaggaaattgcatcgcattgtctgagtaggtgtcattctattctggggggtggggtggggcaggacagcaagggggaggattgggaagacaatagcaggcatgctggggatgcggtgggctctatgggtacccaggtgctgaagaattgacccggttcctcctgggccagaaagaagcaggcacatccccttctctgtgacacaccctgtccacgcccctggttcttagttccagccccactcataggacactcatagctcaggagggctccgccttcaatcccacccgctaaagtacttggagcggtctctccctccctcatcagcccaccaaaccaaacctagcctccaagagtgggaagaaattaaagcaagataggctattaagtgcagagggagagaaaatgcctccaacatgtgaggaagtaatgagagaaatcatagaattttaaggccatgatttaaggccatcatggccttaatcttccgcttcctcgctcactgactcgctgcgctcggtcgttcggctgcggcgagcggtatcagctcactcaaaggcggtaatacggttatccacagaatcaggggataacgcaggaaagaacatgtgagcaaaaggccagcaaaaggccaggaaccgtaaaaaggccgcgttgctggcgtttttccataggctccgcccccctgacgagcatcacaaaaatcgacgctcaagtcagaggtggcgaaacccgacaggactataaagataccaggcgtttccccctggaagctccctcgtgcgctctcctgttccgaccctgccgcttaccggatacctgtccgcctttctcccttcgggaagcgtggcgctttctcatagctcacgctgtaggtatctcagttcggtgtaggtcgttcgctccaagctgggctgtgtgcacgaaccccccgttcagcccgaccgctgcgccttatccggtaactatcgtcttgagtccaacccggtaagacacgacttatcgccactggcagcagccactggtaacaggattagcagagcgaggtatgtaggcggtgctacagagttcttgaagtggtggcctaactacggctacactagaagaacagtatttggtatctgcgctctgctgaagccagttaccttcggaaaaagagttggtagctcttgatccggcaaacaaaccaccgctggtagcggtggtttttttgtttgcaagcagcagattacgcgcagaaaaaaaggatctcaagaagatcctttgatcttttctacggggtctgacgctcagtggaacgaaaactcacgttaagggattttggtcatgagattatcaaaaaggatcttcacctagatccttttaaattaaaaatgaagttttaaatcaatctaaagtatatatgagtaaacttggtctgacagttaccaatgcttaatcagtgaggcacctatctcagcgatctgtctatttcgttcatccatagttgcctgactcggggggggggggcgctgaggtctgcctcgtgaagaaggtgttgctgactcataccaggcctgaatcgccccatcatccagccagaaagtgagggagccacggttgatgagagctttgttgtaggtggaccagttggtgattttgaacttttgctttgccacggaacggtctgcgttgtcgggaagatgcgtgatctgatccttcaactcagcaaaagttcgatttattcaacaaagccgccgtcccgtcaagtcagcgtaatgctctgccagtgttacaaccaattaaccaattctgattagaaaaactcatcgagcatcaaatgaaactgcaatttattcatatcaggattatcaataccatatttttgaaaaagccgtttctgtaatgaaggagaaaactcaccgaggcagttccataggatggcaagatcctggtatcggtctgcgattccgactcgtccaacatcaatacaacctattaatttcccctcgtcaaaaataaggttatcaagtgagaaatcaccatgagtgacgactgaatccggtgagaatggcaaaagcttatgcatttctttccagacttgttcaacaggccagccattacgctcgtcatcaaaatcactcgcatcaaccaaaccgttattcattcgtgattgcgcctgagcgagacgaaatacgcgatcgctgttaaaaggacaattacaaacaggaatcgaatgcaaccggcgcaggaacactgccagcgcatcaacaatattttcacctgaatcaggatattcttctaatacctggaatgctgttttcccggggatcgcagtggtgagtaaccatgcatcatcaggagtacggataaaatgcttgatggtcggaagaggcataaattccgtcagccagtttagtctgaccatctcatctgtaacatcattggcaacgctacctttgccatgtttcagaaacaactctggcgcatcgggcttcccatacaatcgatagattgtcgcacctgattgcccgacattatcgcgagcccatttatacccatataaatcagcatccatgttggaatttaatcgcggcctcgagcaagacgtttcccgttgaatatggctcataacaccccttgtattactgtttatgtaagcagacagttttattgttcatgatgatatatttttatcttgtgcaatgtaacatcagagattttgagacacaacgtggctttccccccccccccattattgaagcatttatcagggttattgtctcatgagcggatacatatttgaatgtatttagaaaaataaacaaataggggttccgcgcacatttccccgaaaagtgccacctgacgtctaagaaaccattattatcatgacattaacctataaaaataggcgtatcacgaggccctttcgtc

SEQ ID NO: 65 - DNA, 1425 bp, Artificial Sequence
  Description of Artificial Sequence: Synthetic polynucleotide
atgggatggtcatgtatcatcctttttctagtagcaactgcaaccggtgtacattcccaggtccggctgagccagagcggaggccagatgaagaagccaggagatagtatgaggattagttgtcgagcaagcgggtatgagtttatcaactgcccaattaattgggtgcgcctggcaccaggaaagcgacctgagtggatgggatggatgaaaccacgagggggagccgtgagctacgctcgacagctgcagggaagagtcaccatgacaagggacatgtattctgagaccgctttcctggaactgaggtctctgacaagtgacgatactgcagtctacttttgcgcccggggcaagtattgtacagcaagagactactataactgggatttcgaacactggggacagggaactcccgtgaccgtcagctccccgtcgaccaagggcccatcggtcttccccctggcaccctcctccaagagcacctctgggggcacagcggccctgggctgcctggtcaaggactacttccccgaacccgtgacggtgtcgtggaactcaggcgccctgaccagcggcgtgcacaccttcccggctgtcctacagtcctcaggactctactccctcagcagcgtggtgaccgtgccctccagcagcttgggcacccagacctacatctgcaacgtgaatcacaagcccagcaacaccaaggtggacaagaaagttgagcccaaatcttgtgacaaaactcacacatgcccaccgtgcccagcacctgaactcctggggggaccgtcagtcttcctcttccccccaaaacccaaggacaccctcatgatctcccggacccctgaggtcacatgcgtggtggtggacgtgagccacgaagaccctgaggtcaagttcaactggtacgtggacggcgtggaggtgcataatgccaagacaaagccgcgggaggagcagtacaacagcacgtaccgtgtggtcagcgtcctcaccgtcctgcaccaggactggctgaatggcaaggagtacaagtgcaaggtctccaacaaagccctcccagcccccatcgagaaaaccatctccaaagccaaagggcagccccgagaaccacaggtgtacaccctgcccccatcccgggatgagctgaccaagaaccaggtcagcctgacctgcctggtcaaaggcttctatcccagcgacatcgccgtggagtgggagagcaatgggcagccggagaacaactacaagaccacgcctcccgtgctggactccgacggctccttcttcctctacagcaagctcaccgtggacaagagcaggtggcagcaggggaacgtcttctcatgctccgtgatgcatgaggctctgcacaaccactacacgcagaagagcctctccctgtctccgggtaaatga

SEQ ID NO: 66 - DNA, 5838 bp, Artificial Sequence
  Description of Artificial Sequence: Synthetic polynucleotide
tcgcgcgtttcggtgatgacggtgaaaacctctgacacatgcagctcccggagacggtcacagcttgtctgtaagcggatgccgggagcagacaagcccgtcagggcgcgtcagcgggtgttggcgggtgtcggggctggcttaactatgcggcatcagagcagattgtactgagagtgcaccatatgcggtgtgaaataccgcacagatgcgtaaggagaaaataccgcatcagattggctattggccattgcatacgttgtatccatatcataatatgtacatttatattggctcatgtccaacattaccgccatgttgacattgattattgactagttattaatagtaatcaattacggggtcattagttcatagcccatatatggagttccgcgttacataacttacggtaaatggcccgcctggctgaccgcccaacgacccccgcccattgacgtcaataatgacgtatgttcccatagtaacgccaatagggactttccattgacgtcaatgggtggagtatttacggtaaactgcccacttggcagtacatcaagtgtatcatatgccaagtacgccccctattgacgtcaatgacggtaaatggcccgcctggcattatgcccagtacatgaccttatgggactttcctacttggcagtacatctacgtattagtcatcgctattaccatggtgatgcggttttggcagtacatcaatgggcgtggatagcggtttgactcacggggatttccaagtctccaccccattgacgtcaatgggagtttgttttggcaccaaaatcaacgggactttccaaaatgtcgtaacaactccgccccattgacgcaaatgggcggtaggcgtgtacggtgggaggtctatataagcagagctcgtttagtgaaccgtcagatcgcctggagacgccatccacgctgttttgacctccatagaagacaccgggaccgatccagcctccatcggctcgcatctctccttcacgcgcccgccgccctacctgaggccgccatccacgccggttgagtcgcgttctgccgcctcccgcctgtggtgcctcctgaactgcgtccgccgtctaggtaagtttaaagctcaggtcgagaccgggcctttgtccggcgctcccttggagcctacctagactcagccggctctccacgctttgcctgaccctgcttgctcaactctagttaacggtggagggcagtgtagtctgagcagtactcgttgctgccgcgcgcgccaccagacataatagctgacagactaacagactgttcctttccatgggtcttttctgcagtcaccgtcctcgacacgtgtgatcagatatcgcggccgctctagaccaccatgggatggtcatgtatcatcctttttctagtagcaactgcaaccggtgtacattcccaggtccggctgagccagagcggaggccagatgaagaagccaggagatagtatgaggattagttgtcgagcaagcgggtatgagtttatcaactgcccaattaattgggtgcgcctggcaccaggaaagcgacctgagtggatgggatggatgaaaccacgagggggagccgtgagctacgctcgacagctgcagggaagagtcaccatgacaagggacatgtattctgagaccgctttcctggaactgaggtctctgacaagtgacgatactgcagtctacttttgcgcccggggcaagtattgtacagcaagagactactataactgggatttcgaacactggggacagggaactcccgtgaccgtcagctccccgtcgaccaagggcccatcggtcttccccctggcaccctcctccaagagcacctctgggggcacagcggccctgggctgcctggtcaaggactacttccccgaacccgtgacggtgtcgtggaactcaggcgccctgaccagcggcgtgcacaccttcccggctgtcctacagtcctcaggactctactccctcagcagcgtggtgaccgtgccctccagcagcttgggcacccagacctacatctgcaacgtgaatcacaagcccagcaacaccaaggtggacaagaaagttgagcccaaatcttgtgacaaaactcacacatgcccaccgtgcccagcacctgaactcctggggggaccgtcagtcttcctcttccccccaaaacccaaggacaccctcatgatctcccggacccctgaggtcacatgcgtggtggtggacgtgagccacgaagaccctgaggtcaagttcaactggtacgtggacggcgtggaggtgcataatgccaagacaaagccgcgggaggagcagtacaacagcacgtaccgtgtggtcagcgtcctcaccgtcctgcaccaggactggctgaatggcaaggagtacaagtgcaaggtctccaacaaagccctcccagcccccatcgagaaaaccatctccaaagccaaagggcagccccgagaaccacaggtgtacaccctgcccccatcccgggatgagctgaccaagaaccaggtcagcctgacctgcctggtcaaaggcttctatcccagcgacatcgccgtggagtgggagagcaatgggcagccggagaacaactacaagaccacgcctcccgtgctggactccgacggctccttcttcctctacagcaagctcaccgtggacaagagcaggtggcagcaggggaacgtcttctcatgctccgtgatgcatgaggctctgcacaaccactacacgcagaagagcctctccctgtctccgggtaaatgatgaggatccagatctgctgtgccttctagttgccagccatctgttgtttgcccctcccccgtgccttccttgaccctggaaggtgccactcccactgtcctttcctaataaaatgaggaaattgcatcgcattgtctgagtaggtgtcattctattctggggggtggggtggggcaggacagcaagggggaggattgggaagacaatagcaggcatgctggggatgcggtgggctctatgggtacccaggtgctgaagaattgacccggttcctcctgggccagaaagaagcaggcacatccccttctctgtgacacaccctgtccacgcccctggttcttagttccagccccactcataggacactcatagctcaggagggctccgccttcaatcccacccgctaaagtacttggagcggtctctccctccctcatcagcccaccaaaccaaacctagcctccaagagtgggaagaaattaaagcaagataggctattaagtgcagagggagagaaaatgcctccaacatgtgaggaagtaatgagagaaatcatagaattttaaggccatgatttaaggccatcatggccttaatcttccgcttcctcgctcactgactcgctgcgctcggtcgttcggctgcggcgagcggtatcagctcactcaaaggcggtaatacggttatccacagaatcaggggataacgcaggaaagaacatgtgagcaaaaggccagcaaaaggccaggaaccgtaaaaaggccgcgttgctggcgtttttccataggctccgcccccctgacgagcatcacaaaaatcgacgctcaagtcagaggtggcgaaacccgacaggactataaagataccaggcgtttccccctggaagctccctcgtgcgctctcctgttccgaccctgccgcttaccggatacctgtccgcctttctcccttcgggaagcgtggcgctttctcatagctcacgctgtaggtatctcagttcggtgtaggtcgttcgctccaagctgggctgtgtgcacgaaccccccgttcagcccgaccgctgcgccttatccggtaactatcgtcttgagtccaacccggtaagacacgacttatcgccactggcagcagccactggtaacaggattagcagagcgaggtatgtaggcggtgctacagagttcttgaagtggtggcctaactacggctacactagaagaacagtatttggtatctgcgctctgctgaagccagttaccttcggaaaaagagttggtagctcttgatccggcaaacaaaccaccgctggtagcggtggtttttttgtttgcaagcagcagattacgcgcagaaaaaaaggatctcaagaagatcctttgatcttttctacggggtctgacgctcagtggaacgaaaactcacgttaagggattttggtcatgagattatcaaaaaggatcttcacctagatccttttaaattaaaaatgaagttttaaatcaatctaaagtatatatgagtaaacttggtctgacagttaccaatgcttaatcagtgaggcacctatctcagcgatctgtctatttcgttcatccatagttgcctgactcggggggggggggcgctgaggtctgcctcgtgaagaaggtgttgctgactcataccaggcctgaatcgccccatcatccagccagaaagtgagggagccacggttgatgagagctttgttgtaggtggaccagttggtgattttgaacttttgctttgccacggaacggtctgcgttgtcgggaagatgcgtgatctgatccttcaactcagcaaaagttcgatttattcaacaaagccgccgtcccgtcaagtcagcgtaatgctctgccagtgttacaaccaattaaccaattctgattagaaaaactcatcgagcatcaaatgaaactgcaatttattcatatcaggattatcaataccatatttttgaaaaagccgtttctgtaatgaaggagaaaactcaccgaggcagttccataggatggcaagatcctggtatcggtctgcgattccgactcgtccaacatcaatacaacctattaatttcccctcgtcaaaaataaggttatcaagtgagaaatcaccatgagtgacgactgaatccggtgagaatggcaaaagcttatgcatttctttccagacttgttcaacaggccagccattacgctcgtcatcaaaatcactcgcatcaaccaaaccgttattcattcgtgattgcgcctgagcgagacgaaatacgcgatcgctgttaaaaggacaattacaaacaggaatcgaatgcaaccggcgcaggaacactgccagcgcatcaacaatattttcacctgaatcaggatattcttctaatacctggaatgctgttttcccggggatcgcagtggtgagtaaccatgcatcatcaggagtacggataaaatgcttgatggtcggaagaggcataaattccgtcagccagtttagtctgaccatctcatctgtaacatcattggcaacgctacctttgccatgtttcagaaacaactctggcgcatcgggcttcccatacaatcgatagattgtcgcacctgattgcccgacattatcgcgagcccatttatacccatataaatcagcatccatgttggaatttaatcgcggcctcgagcaagacgtttcccgttgaatatggctcataacaccccttgtattactgtttatgtaagcagacagttttattgttcatgatgatatatttttatcttgtgcaatgtaacatcagagattttgagacacaacgtggctttccccccccccccattattgaagcatttatcagggttattgtctcatgagcggatacatatttgaatgtatttagaaaaataaacaaataggggttccgcgcacatttccccgaaaagtgccacctgacgtctaagaaaccattattatcatgacattaacctataaaaataggcgtatcacgaggccctttcgtc

SEQ ID NO: 67 - DNA, 1425 bp, Artificial Sequence
  Description of Artificial Sequence: Synthetic polynucleotide
atgggatggtcatgtatcatcctttttctagtagcaactgcaaccggtgtacattcccaggtccagctgagccagagcggaggccagatgaagaagccaggagatagtatgaggattagttgtcgagcaagcgggtatgagtttatcaactgcccaattaattggatacgcctggcaccaggaaagcgacctgagtggatgggatggatgaaaccacgagggggagccgtgagctacgctcgacagctgcagggaagagtcaccatgacaagggacatgtattctgagaccgctttcctggaactgaggtctctgacaagtgacgatactgcagtctacttttgcgcccggggcaagtattgtacagcaagagactactataactgggatttcgaacactggggacagggaactcccgtgaccgtcagctccccgtcgaccaagggcccatcggtcttccccctggcaccctcctccaagagcacctctgggggcacagcggccctgggctgcctggtcaaggactacttccccgaacccgtgacggtgtcgtggaactcaggcgccctgaccagcggcgtgcacaccttcccggctgtcctacagtcctcaggactctactccctcagcagcgtggtgaccgtgccctccagcagcttgggcacccagacctacatctgcaacgtgaatcacaagcccagcaacaccaaggtggacaagaaagttgagcccaaatcttgtgacaaaactcacacatgcccaccgtgcccagcacctgaactcctggggggaccgtcagtcttcctcttccccccaaaacccaaggacaccctcatgatctcccggacccctgaggtcacatgcgtggtggtggacgtgagccacgaagaccctgaggtcaagttcaactggtacgtggacggcgtggaggtgcataatgccaagacaaagccgcgggaggagcagtacaacagcacgtaccgtgtggtcagcgtcctcaccgtcctgcaccaggactggctgaatggcaaggagtacaagtgcaaggtctccaacaaagccctcccagcccccatcgagaaaaccatctccaaagccaaagggcagccccgagaaccacaggtgtacaccctgcccccatcccgggatgagctgaccaagaaccaggtcagcctgacctgcctggtcaaaggcttctatcccagcgacatcgccgtggagtgggagagcaatgggcagccggagaacaactacaagaccacgcctcccgtgctggactccgacggctccttcttcctctacagcaagctcaccgtggacaagagcaggtggcagcaggggaacgtcttctcatgctccgtgatgcatgaggctctgcacaaccactacacgcagaagagcctctccctgtctccgggtaaatga

SEQ ID NO: 68 - DNA, 5838 bp, Artificial Sequence
  Description of Artificial Sequence: Synthetic polynucleotide
tcgcgcgtttcggtgatgacggtgaaaacctctgacacatgcagctcccggagacggtcacagcttgtctgtaagcggatgccgggagcagacaagcccgtcagggcgcgtcagcgggtgttggcgggtgtcggggctggcttaactatgcggcatcagagcagattgtactgagagtgcaccatatgcggtgtgaaataccgcacagatgcgtaaggagaaaataccgcatcagattggctattggccattgcatacgttgtatccatatcataatatgtacatttatattggctcatgtccaacattaccgccatgttgacattgattattgactagttattaatagtaatcaattacggggtcattagttcatagcccatatatggagttccgcgttacataacttacggtaaatggcccgcctggctgaccgcccaacgacccccgcccattgacgtcaataatgacgtatgttcccatagtaacgccaatagggactttccattgacgtcaatgggtggagtatttacggtaaactgcccacttggcagtacatcaagtgtatcatatgccaagtacgccccctattgacgtcaatgacggtaaatggcccgcctggcattatgcccagtacatgaccttatgggactttcctacttggcagtacatctacgtattagtcatcgctattaccatggtgatgcggttttggcagtacatcaatgggcgtggatagcggtttgactcacggggatttccaagtctccaccccattgacgtcaatgggagtttgttttggcaccaaaatcaacgggactttccaaaatgtcgtaacaactccgccccattgacgcaaatgggcggtaggcgtgtacggtgggaggtctatataagcagagctcgtttagtgaaccgtcagatcgcctggagacgccatccacgctgttttgacctccatagaagacaccgggaccgatccagcctccatcggctcgcatctctccttcacgcgcccgccgccctacctgaggccgccatccacgccggttgagtcgcgttctgccgcctcccgcctgtggtgcctcctgaactgcgtccgccgtctaggtaagtttaaagctcaggtcgagaccgggcctttgtccggcgctcccttggagcctacctagactcagccggctctccacgctttgcctgaccctgcttgctcaactctagttaacggtggagggcagtgtagtctgagcagtactcgttgctgccgcgcgcgccaccagacataatagctgacagactaacagactgttcctttccatgggtcttttctgcagtcaccgtcctcgacacgtgtgatcagatatcgcggccgctctagaccaccatgggatggtcatgtatcatcctttttctagtagcaactgcaaccggtgtacattcccaggtccagctgagccagagcggaggccagatgaagaagccaggagatagtatgaggattagttgtcgagcaagcgggtatgagtttatcaactgcccaattaattggatacgcctggcaccaggaaagcgacctgagtggatgggatggatgaaaccacgagggggagccgtgagctacgctcgacagctgcagggaagagtcaccatgacaagggacatgtattctgagaccgctttcctggaactgaggtctctgacaagtgacgatactgcagtctacttttgcgcccggggcaagtattgtacagcaagagactactataactgggatttcgaacactggggacagggaactcccgtgaccgtcagctccccgtcgaccaagggcccatcggtcttccccctggcaccctcctccaagagcacctctgggggcacagcggccctgggctgcctggtcaaggactacttccccgaacccgtgacggtgtcgtggaactcaggcgccctgaccagcggcgtgcacaccttcccggctgtcctacagtcctcaggactctactccctcagcagcgtggtgaccgtgccctccagcagcttgggcacccagacctacatctgcaacgtgaatcacaagcccagcaacaccaaggtggacaagaaagttgagcccaaatcttgtgacaaaactcacacatgcccaccgtgcccagcacctgaactcctggggggaccgtcagtcttcctcttccccccaaaacccaaggacaccctcatgatctcccggacccctgaggtcacatgcgtggtggtggacgtgagccacgaagaccctgaggtcaagttcaactggtacgtggacggcgtggaggtgcataatgccaagacaaagccgcgggaggagcagtacaacagcacgtaccgtgtggtcagcgtcctcaccgtcctgcaccaggactggctgaatggcaaggagtacaagtgcaaggtctccaacaaagccctcccagcccccatcgagaaaaccatctccaaagccaaagggcagccccgagaaccacaggtgtacaccctgcccccatcccgggatgagctgaccaagaaccaggtcagcctgacctgcctggtcaaaggcttctatcccagcgacatcgccgtggagtgggagagcaatgggcagccggagaacaactacaagaccacgcctcccgtgctggactccgacggctccttcttcctctacagcaagctcaccgtggacaagagcaggtggcagcaggggaacgtcttctcatgctccgtgatgcatgaggctctgcacaaccactacacgcagaagagcctctccctgtctccgggtaaatgatgaggatccagatctgctgtgccttctagttgccagccatctgttgtttgcccctcccccgtgccttccttgaccctggaaggtgccactcccactgtcctttcctaataaaatgaggaaattgcatcgcattgtctgagtaggtgtcattctattctggggggtggggtggggcaggacagcaagggggaggattgggaagacaatagcaggcatgctggggatgcggtgggctctatgggtacccaggtgctgaagaattgacccggttcctcctgggccagaaagaagcaggcacatccccttctctgtgacacaccctgtccacgcccctggttcttagttccagccccactcataggacactcatagctcaggagggctccgccttcaatcccacccgctaaagtacttggagcggtctctccctccctcatcagcccaccaaaccaaacctagcctccaagagtgggaagaaattaaagcaagataggctattaagtgcagagggagagaaaatgcctccaacatgtgaggaagtaatgagagaaatcatagaattttaaggccatgatttaaggccatcatggccttaatcttccgcttcctcgctcactgactcgctgcgctcggtcgttcggctgcggcgagcggtatcagctcactcaaaggcggtaatacggttatccacagaatcaggggataacgcaggaaagaacatgtgagcaaaaggccagcaaaaggccaggaaccgtaaaaaggccgcgttgctggcgtttttccataggctccgcccccctgacgagcatcacaaaaatcgacgctcaagtcagaggtggcgaaacccgacaggactataaagataccaggcgtttccccctggaagctccctcgtgcgctctcctgttccgaccctgccgcttaccggatacctgtccgcctttctcccttcgggaagcgtggcgctttctcatagctcacgctgtaggtatctcagttcggtgtaggtcgttcgctccaagctgggctgtgtgcacgaaccccccgttcagcccgaccgctgcgccttatccggtaactatcgtcttgagtccaacccggtaagacacgacttatcgccactggcagcagccactggtaacaggattagcagagcgaggtatgtaggcggtgctacagagttcttgaagtggtggcctaactacggctacactagaagaacagtatttggtatctgcgctctgctgaagccagttaccttcggaaaaagagttggtagctcttgatccggcaaacaaaccaccgctggtagcggtggtttttttgtttgcaagcagcagattacgcgcagaaaaaaaggatctcaagaagatcctttgatcttttctacggggtctgacgctcagtggaacgaaaactcacgttaagggattttggtcatgagattatcaaaaaggatcttcacctagatccttttaaattaaaaatgaagttttaaatcaatctaaagtatatatgagtaaacttggtctgacagttaccaatgcttaatcagtgaggcacctatctcagcgatctgtctatttcgttcatccatagttgcctgactcggggggggggggcgctgaggtctgcctcgtgaagaaggtgttgctgactcataccaggcctgaatcgccccatcatccagccagaaagtgagggagccacggttgatgagagctttgttgtaggtggaccagttggtgattttgaacttttgctttgccacggaacggtctgcgttgtcgggaagatgcgtgatctgatccttcaactcagcaaaagttcgatttattcaacaaagccgccgtcccgtcaagtcagcgtaatgctctgccagtgttacaaccaattaaccaattctgattagaaaaactcatcgagcatcaaatgaaactgcaatttattcatatcaggattatcaataccatatttttgaaaaagccgtttctgtaatgaaggagaaaactcaccgaggcagttccataggatggcaagatcctggtatcggtctgcgattccgactcgtccaacatcaatacaacctattaatttcccctcgtcaaaaataaggttatcaagtgagaaatcaccatgagtgacgactgaatccggtgagaatggcaaaagcttatgcatttctttccagacttgttcaacaggccagccattacgctcgtcatcaaaatcactcgcatcaaccaaaccgttattcattcgtgattgcgcctgagcgagacgaaatacgcgatcgctgttaaaaggacaattacaaacaggaatcgaatgcaaccggcgcaggaacactgccagcgcatcaacaatattttcacctgaatcaggatattcttctaatacctggaatgctgttttcccggggatcgcagtggtgagtaaccatgcatcatcaggagtacggataaaatgcttgatggtcggaagaggcataaattccgtcagccagtttagtctgaccatctcatctgtaacatcattggcaacgctacctttgccatgtttcagaaacaactctggcgcatcgggcttcccatacaatcgatagattgtcgcacctgattgcccgacattatcgcgagcccatttatacccatataaatcagcatccatgttggaatttaatcgcggcctcgagcaagacgtttcccgttgaatatggctcataacaccccttgtattactgtttatgtaagcagacagttttattgttcatgatgatatatttttatcttgtgcaatgtaacatcagagattttgagacacaacgtggctttccccccccccccattattgaagcatttatcagggttattgtctcatgagcggatacatatttgaatgtatttagaaaaataaacaaataggggttccgcgcacatttccccgaaaagtgccacctgacgtctaagaaaccattattatcatgacattaacctataaaaataggcgtatcacgaggccctttcgtc

SEQ ID NO: 69 - DNA, 1425 bp, Artificial Sequence
  Description of Artificial Sequence: Synthetic polynucleotide
atgggatggtcatgtatcatcctttttctagtagcaactgcaaccggtgtacattcccaggtccagctgagccagagcggaggccagatgaagaagccaggagatagtatgaggattagttgtcgagcaagcgggtatgagtttatcaactgcccaattaattgggtgcgcctggcaccaggaaagcgacctgagtggatgggatggatgaaaccacgagggggagccgtgagctacgctcgacagctgcagggaagagtcaccatgacaagggacatgtattctgagaccgctttcctggaactgaggtctctgacaagtgacgatactgcagtctacttttgcacccggggcaagtattgtacagcaagagactactataactgggatttcgaacactggggacagggaactcccgtgaccgtcagctccccgtcgaccaagggcccatcggtcttccccctggcaccctcctccaagagcacctctgggggcacagcggccctgggctgcctggtcaaggactacttccccgaacccgtgacggtgtcgtggaactcaggcgccctgaccagcggcgtgcacaccttcccggctgtcctacagtcctcaggactctactccctcagcagcgtggtgaccgtgccctccagcagcttgggcacccagacctacatctgcaacgtgaatcacaagcccagcaacaccaaggtggacaagaaagttgagcccaaatcttgtgacaaaactcacacatgcccaccgtgcccagcacctgaactcctggggggaccgtcagtcttcctcttccccccaaaacccaaggacaccctcatgatctcccggacccctgaggtcacatgcgtggtggtggacgtgagccacgaagaccctgaggtcaagttcaactggtacgtggacggcgtggaggtgcataatgccaagacaaagccgcgggaggagcagtacaacagcacgtaccgtgtggtcagcgtcctcaccgtcctgcaccaggactggctgaatggcaaggagtacaagtgcaaggtctccaacaaagccctcccagcccccatcgagaaaaccatctccaaagccaaagggcagccccgagaaccacaggtgtacaccctgcccccatcccgggatgagctgaccaagaaccaggtcagcctgacctgcctggtcaaaggcttctatcccagcgacatcgccgtggagtgggagagcaatgggcagccggagaacaactacaagaccacgcctcccgtgctggactccgacggctccttcttcctctacagcaagctcaccgtggacaagagcaggtggcagcaggggaacgtcttctcatgctccgtgatgcatgaggctctgcacaaccactacacgcagaagagcctctccctgtctccgggtaaatga

SEQ ID NO: 70 - DNA, 5838 bp, Artificial Sequence
  Description of Artificial Sequence: Synthetic polynucleotide
tcgcgcgtttcggtgatgacggtgaaaacctctgacacatgcagctcccggagacggtcacagcttgtctgtaagcggatgccgggagcagacaagcccgtcagggcgcgtcagcgggtgttggcgggtgtcggggctggcttaactatgcggcatcagagcagattgtactgagagtgcaccatatgcggtgtgaaataccgcacagatgcgtaaggagaaaataccgcatcagattggctattggccattgcatacgttgtatccatatcataatatgtacatttatattggctcatgtccaacattaccgccatgttgacattgattattgactagttattaatagtaatcaattacggggtcattagttcatagcccatatatggagttccgcgttacataacttacggtaaatggcccgcctggctgaccgcccaacgacccccgcccattgacgtcaataatgacgtatgttcccatagtaacgccaatagggactttccattgacgtcaatgggtggagtatttacggtaaactgcccacttggcagtacatcaagtgtatcatatgccaagtacgccccctattgacgtcaatgacggtaaatggcccgcctggcattatgcccagtacatgaccttatgggactttcctacttggcagtacatctacgtattagtcatcgctattaccatggtgatgcggttttggcagtacatcaatgggcgtggatagcggtttgactcacggggatttccaagtctccaccccattgacgtcaatgggagtttgttttggcaccaaaatcaacgggactttccaaaatgtcgtaacaactccgccccattgacgcaaatgggcggtaggcgtgtacggtgggaggtctatataagcagagctcgtttagtgaaccgtcagatcgcctggagacgccatccacgctgttttgacctccatagaagacaccgggaccgatccagcctccatcggctcgcatctctccttcacgcgcccgccgccctacctgaggccgccatccacgccggttgagtcgcgttctgccgcctcccgcctgtggtgcctcctgaactgcgtccgccgtctaggtaagtttaaagctcaggtcgagaccgggcctttgtccggcgctcccttggagcctacctagactcagccggctctccacgctttgcctgaccctgcttgctcaactctagttaacggtggagggcagtgtagtctgagcagtactcgttgctgccgcgcgcgccaccagacataatagctgacagactaacagactgttcctttccatgggtcttttctgcagtcaccgtcctcgacacgtgtgatcagatatcgcggccgctctagaccaccatgggatggtcatgtatcatcctttttctagtagcaactgcaaccggtgtacattcccaggtccagctgagccagagcggaggccagatgaagaagccaggagatagtatgaggattagttgtcgagcaagcgggtatgagtttatcaactgcccaattaattgggtgcgcctggcaccaggaaagcgacctgagtggatgggatggatgaaaccacgagggggagccgtgagctacgctcgacagctgcagggaagagtcaccatgacaagggacatgtattctgagaccgctttcctggaactgaggtctctgacaagtgacgatactgcagtctacttttgcacccggggcaagtattgtacagcaagagactactataactgggatttcgaacactggggacagggaactcccgtgaccgtcagctccccgtcgaccaagggcccatcggtcttccccctggcaccctcctccaagagcacctctgggggcacagcggccctgggctgcctggtcaaggactacttccccgaacccgtgacggtgtcgtggaactcaggcgccctgaccagcggcgtgcacaccttcccggctgtcctacagtcctcaggactctactccctcagcagcgtggtgaccgtgccctccagcagcttgggcacccagacctacatctgcaacgtgaatcacaagcccagcaacaccaaggtggacaagaaagttgagcccaaatcttgtgacaaaactcacacatgcccaccgtgcccagcacctgaactcctggggggaccgtcagtcttcctcttccccccaaaacccaaggacaccctcatgatctcccggacccctgaggtcacatgcgtggtggtggacgtgagccacgaagaccctgaggtcaagttcaactggtacgtggacggcgtggaggtgcataatgccaagacaaagccgcgggaggagcagtacaacagcacgtaccgtgtggtcagcgtcctcaccgtcctgcaccaggactggctgaatggcaaggagtacaagtgcaaggtctccaacaaagccctcccagcccccatcgagaaaaccatctccaaagccaaagggcagccccgagaaccacaggtgtacaccctgcccccatcccgggatgagctgaccaagaaccaggtcagcctgacctgcctggtcaaaggcttctatcccagcgacatcgccgtggagtgggagagcaatgggcagccggagaacaactacaagaccacgcctcccgtgctggactccgacggctccttcttcctctacagcaagctcaccgtggacaagagcaggtggcagcaggggaacgtcttctcatgctccgtgatgcatgaggctctgcacaaccactacacgcagaagagcctctccctgtctccgggtaaatgatgaggatccagatctgctgtgccttctagttgccagccatctgttgtttgcccctcccccgtgccttccttgaccctggaaggtgccactcccactgtcctttcctaataaaatgaggaaattgcatcgcattgtctgagtaggtgtcattctattctggggggtggggtggggcaggacagcaagggggaggattgggaagacaatagcaggcatgctggggatgcggtgggctctatgggtacccaggtgctgaagaattgacccggttcctcctgggccagaaagaagcaggcacatccccttctctgtgacacaccctgtccacgcccctggttcttagttccagccccactcataggacactcatagctcaggagggctccgccttcaatcccacccgctaaagtacttggagcggtctctccctccctcatcagcccaccaaaccaaacctagcctccaagagtgggaagaaattaaagcaagataggctattaagtgcagagggagagaaaatgcctccaacatgtgaggaagtaatgagagaaatcatagaattttaaggccatgatttaaggccatcatggccttaatcttccgcttcctcgctcactgactcgctgcgctcggtcgttcggctgcggcgagcggtatcagctcactcaaaggcggtaatacggttatccacagaatcaggggataacgcaggaaagaacatgtgagcaaaaggccagcaaaaggccaggaaccgtaaaaaggccgcgttgctggcgtttttccataggctccgcccccctgacgagcatcacaaaaatcgacgctcaagtcagaggtggcgaaacccgacaggactataaagataccaggcgtttccccctggaagctccctcgtgcgctctcctgttccgaccctgccgcttaccggatacctgtccgcctttctcccttcgggaagcgtggcgctttctcatagctcacgctgtaggtatctcagttcggtgtaggtcgttcgctccaagctgggctgtgtgcacgaaccccccgttcagcccgaccgctgcgccttatccggtaactatcgtcttgagtccaacccggtaagacacgacttatcgccactggcagcagccactggtaacaggattagcagagcgaggtatgtaggcggtgctacagagttcttgaagtggtggcctaactacggctacactagaagaacagtatttggtatctgcgctctgctgaagccagttaccttcggaaaaagagttggtagctcttgatccggcaaacaaaccaccgctggtagcggtggtttttttgtttgcaagcagcagattacgcgcagaaaaaaaggatctcaagaagatcctttgatcttttctacggggtctgacgctcagtggaacgaaaactcacgttaagggattttggtcatgagattatcaaaaaggatcttcacctagatccttttaaattaaaaatgaagttttaaatcaatctaaagtatatatgagtaaacttggtctgacagttaccaatgcttaatcagtgaggcacctatctcagcgatctgtctatttcgttcatccatagttgcctgactcggggggggggggcgctgaggtctgcctcgtgaagaaggtgttgctgactcataccaggcctgaatcgccccatcatccagccagaaagtgagggagccacggttgatgagagctttgttgtaggtggaccagttggtgattttgaacttttgctttgccacggaacggtctgcgttgtcgggaagatgcgtgatctgatccttcaactcagcaaaagttcgatttattcaacaaagccgccgtcccgtcaagtcagcgtaatgctctgccagtgttacaaccaattaaccaattctgattagaaaaactcatcgagcatcaaatgaaactgcaatttattcatatcaggattatcaataccatatttttgaaaaagccgtttctgtaatgaaggagaaaactcaccgaggcagttccataggatggcaagatcctggtatcggtctgcgattccgactcgtccaacatcaatacaacctattaatttcccctcgtcaaaaataaggttatcaagtgagaaatcaccatgagtgacgactgaatccggtgagaatggcaaaagcttatgcatttctttccagacttgttcaacaggccagccattacgctcgtcatcaaaatcactcgcatcaaccaaaccgttattcattcgtgattgcgcctgagcgagacgaaatacgcgatcgctgttaaaaggacaattacaaacaggaatcgaatgcaaccggcgcaggaacactgccagcgcatcaacaatattttcacctgaatcaggatattcttctaatacctggaatgctgttttcccggggatcgcagtggtgagtaaccatgcatcatcaggagtacggataaaatgcttgatggtcggaagaggcataaattccgtcagccagtttagtctgaccatctcatctgtaacatcattggcaacgctacctttgccatgtttcagaaacaactctggcgcatcgggcttcccatacaatcgatagattgtcgcacctgattgcccgacattatcgcgagcccatttatacccatataaatcagcatccatgttggaatttaatcgcggcctcgagcaagacgtttcccgttgaatatggctcataacaccccttgtattactgtttatgtaagcagacagttttattgttcatgatgatatatttttatcttgtgcaatgtaacatcagagattttgagacacaacgtggctttccccccccccccattattgaagcatttatcagggttattgtctcatgagcggatacatatttgaatgtatttagaaaaataaacaaataggggttccgcgcacatttccccgaaaagtgccacctgacgtctaagaaaccattattatcatgacattaacctataaaaataggcgtatcacgaggccctttcgtc

SEQ ID NO: 71 - DNA, 1425 bp, Artificial Sequence
  Description of Artificial Sequence: Synthetic polynucleotide
atgggatggtcatgtatcatcctttttctagtagcaactgcaaccggtgtacattcccaggtccggctgagccagagcggaggccagatgaagaagccaggagatagtatgaggattagttgtcgagcaagcgggtatgagtttatcaactgcccaattaattggatacgcctggcaccaggaaagcgacctgagtggatgggatggatgaaaccacgagggggagccgtgagctacgctcgacagctgcagggaagagtcaccatgacaagggacatgtattctgagaccgctttcctggaactgaggtctctgacaagtgacgatactgcagtctacttttgcgcccggggcaagtattgtacagcaagagactactataactgggatttcgaacactggggacagggaactcccgtgaccgtcagctccccgtcgaccaagggcccatcggtcttccccctggcaccctcctccaagagcacctctgggggcacagcggccctgggctgcctggtcaaggactacttccccgaacccgtgacggtgtcgtggaactcaggcgccctgaccagcggcgtgcacaccttcccggctgtcctacagtcctcaggactctactccctcagcagcgtggtgaccgtgccctccagcagcttgggcacccagacctacatctgcaacgtgaatcacaagcccagcaacaccaaggtggacaagaaagttgagcccaaatcttgtgacaaaactcacacatgcccaccgtgcccagcacctgaactcctggggggaccgtcagtcttcctcttccccccaaaacccaaggacaccctcatgatctcccggacccctgaggtcacatgcgtggtggtggacgtgagccacgaagaccctgaggtcaagttcaactggtacgtggacggcgtggaggtgcataatgccaagacaaagccgcgggaggagcagtacaacagcacgtaccgtgtggtcagcgtcctcaccgtcctgcaccaggactggctgaatggcaaggagtacaagtgcaaggtctccaacaaagccctcccagcccccatcgagaaaaccatctccaaagccaaagggcagccccgagaaccacaggtgtacaccctgcccccatcccgggatgagctgaccaagaaccaggtcagcctgacctgcctggtcaaaggcttctatcccagcgacatcgccgtggagtgggagagcaatgggcagccggagaacaactacaagaccacgcctcccgtgctggactccgacggctccttcttcctctacagcaagctcaccgtggacaagagcaggtggcagcaggggaacgtcttctcatgctccgtgatgcatgaggctctgcacaaccactacacgcagaagagcctctccctgtctccgggtaaatga

SEQ ID NO: 72 - DNA, 5838 bp, Artificial Sequence
  Description of Artificial Sequence: Synthetic polynucleotide
tcgcgcgtttcggtgatgacggtgaaaacctctgacacatgcagctcccggagacggtcacagcttgtctgtaagcggatgccgggagcagacaagcccgtcagggcgcgtcagcgggtgttggcgggtgtcggggctggcttaactatgcggcatcagagcagattgtactgagagtgcaccatatgcggtgtgaaataccgcacagatgcgtaaggagaaaataccgcatcagattggctattggccattgcatacgttgtatccatatcataatatgtacatttatattggctcatgtccaacattaccgccatgttgacattgattattgactagttattaatagtaatcaattacggggtcattagttcatagcccatatatggagttccgcgttacataacttacggtaaatggcccgcctggctgaccgcccaacgacccccgcccattgacgtcaataatgacgtatgttcccatagtaacgccaatagggactttccattgacgtcaatgggtggagtatttacggtaaactgcccacttggcagtacatcaagtgtatcatatgccaagtacgccccctattgacgtcaatgacggtaaatggcccgcctggcattatgcccagtacatgaccttatgggactttcctacttggcagtacatctacgtattagtcatcgctattaccatggtgatgcggttttggcagtacatcaatgggcgtggatagcggtttgactcacggggatttccaagtctccaccccattgacgtcaatgggagtttgttttggcaccaaaatcaacgggactttccaaaatgtcgtaacaactccgccccattgacgcaaatgggcggtaggcgtgtacggtgggaggtctatataagcagagctcgtttagtgaaccgtcagatcgcctggagacgccatccacgctgttttgacctccatagaagacaccgggaccgatccagcctccatcggctcgcatctctccttcacgcgcccgccgccctacctgaggccgccatccacgccggttgagtcgcgttctgccgcctcccgcctgtggtgcctcctgaactgcgtccgccgtctaggtaagtttaaagctcaggtcgagaccgggcctttgtccggcgctcccttggagcctacctagactcagccggctctccacgctttgcctgaccctgcttgctcaactctagttaacggtggagggcagtgtagtctgagcagtactcgttgctgccgcgcgcgccaccagacataatagctgacagactaacagactgttcctttccatgggtcttttctgcagtcaccgtcctcgacacgtgtgatcagatatcgcggccgctctagaccaccatgggatggtcatgtatcatcctttttctagtagcaactgcaaccggtgtacattcccaggtccggctgagccagagcggaggccagatgaagaagccaggagatagtatgaggattagttgtcgagcaagcgggtatgagtttatcaactgcccaattaattggatacgcctggcaccaggaaagcgacctgagtggatgggatggatgaaaccacgagggggagccgtgagctacgctcgacagctgcagggaagagtcaccatgacaagggacatgtattctgagaccgctttcctggaactgaggtctctgacaagtgacgatactgcagtctacttttgcgcccggggcaagtattgtacagcaagagactactataactgggatttcgaacactggggacagggaactcccgtgaccgtcagctccccgtcgaccaagggcccatcggtcttccccctggcaccctcctccaagagcacctctgggggcacagcggccctgggctgcctggtcaaggactacttccccgaacccgtgacggtgtcgtggaactcaggcgccctgaccagcggcgtgcacaccttcccggctgtcctacagtcctcaggactctactccctcagcagcgtggtgaccgtgccctccagcagcttgggcacccagacctacatctgcaacgtgaatcacaagcccagcaacaccaaggtggacaagaaagttgagcccaaatcttgtgacaaaactcacacatgcccaccgtgcccagcacctgaactcctggggggaccgtcagtcttcctcttccccccaaaacccaaggacaccctcatgatctcccggacccctgaggtcacatgcgtggtggtggacgtgagccacgaagaccctgaggtcaagttcaactggtacgtggacggcgtggaggtgcataatgccaagacaaagccgcgggaggagcagtacaacagcacgtaccgtgtggtcagcgtcctcaccgtcctgcaccaggactggctgaatggcaaggagtacaagtgcaaggtctccaacaaagccctcccagcccccatcgagaaaaccatctccaaagccaaagggcagccccgagaaccacaggtgtacaccctgcccccatcccgggatgagctgaccaagaaccaggtcagcctgacctgcctggtcaaaggcttctatcccagcgacatcgccgtggagtgggagagcaatgggcagccggagaacaactacaagaccacgcctcccgtgctggactccgacggctccttcttcctctacagcaagctcaccgtggacaagagcaggtggcagcaggggaacgtcttctcatgctccgtgatgcatgaggctctgcacaaccactacacgcagaagagcctctccctgtctccgggtaaatgatgaggatccagatctgctgtgccttctagttgccagccatctgttgtttgcccctcccccgtgccttccttgaccctggaaggtgccactcccactgtcctttcctaataaaatgaggaaattgcatcgcattgtctgagtaggtgtcattctattctggggggtggggtggggcaggacagcaagggggaggattgggaagacaatagcaggcatgctggggatgcggtgggctctatgggtacccaggtgctgaagaattgacccggttcctcctgggccagaaagaagcaggcacatccccttctctgtgacacaccctgtccacgcccctggttcttagttccagccccactcataggacactcatagctcaggagggctccgccttcaatcccacccgctaaagtacttggagcggtctctccctccctcatcagcccaccaaaccaaacctagcctccaagagtgggaagaaattaaagcaagataggctattaagtgcagagggagagaaaatgcctccaacatgtgaggaagtaatgagagaaatcatagaattttaaggccatgatttaaggccatcatggccttaatcttccgcttcctcgctcactgactcgctgcgctcggtcgttcggctgcggcgagcggtatcagctcactcaaaggcggtaatacggttatccacagaatcaggggataacgcaggaaagaacatgtgagcaaaaggccagcaaaaggccaggaaccgtaaaaaggccgcgttgctggcgtttttccataggctccgcccccctgacgagcatcacaaaaatcgacgctcaagtcagaggtggcgaaacccgacaggactataaagataccaggcgtttccccctggaagctccctcgtgcgctctcctgttccgaccctgccgcttaccggatacctgtccgcctttctcccttcgggaagcgtggcgctttctcatagctcacgctgtaggtatctcagttcggtgtaggtcgttcgctccaagctgggctgtgtgcacgaaccccccgttcagcccgaccgctgcgccttatccggtaactatcgtcttgagtccaacccggtaagacacgacttatcgccactggcagcagccactggtaacaggattagcagagcgaggtatgtaggcggtgctacagagttcttgaagtggtggcctaactacggctacactagaagaacagtatttggtatctgcgctctgctgaagccagttaccttcggaaaaagagttggtagctcttgatccggcaaacaaaccaccgctggtagcggtggtttttttgtttgcaagcagcagattacgcgcagaaaaaaaggatctcaagaagatcctttgatcttttctacggggtctgacgctcagtggaacgaaaactcacgttaagggattttggtcatgagattatcaaaaaggatcttcacctagatccttttaaattaaaaatgaagttttaaatcaatctaaagtatatatgagtaaacttggtctgacagttaccaatgcttaatcagtgaggcacctatctcagcgatctgtctatttcgttcatccatagttgcctgactcggggggggggggcgctgaggtctgcctcgtgaagaaggtgttgctgactcataccaggcctgaatcgccccatcatccagccagaaagtgagggagccacggttgatgagagctttgttgtaggtggaccagttggtgattttgaacttttgctttgccacggaacggtctgcgttgtcgggaagatgcgtgatctgatccttcaactcagcaaaagttcgatttattcaacaaagccgccgtcccgtcaagtcagcgtaatgctctgccagtgttacaaccaattaaccaattctgattagaaaaactcatcgagcatcaaatgaaactgcaatttattcatatcaggattatcaataccatatttttgaaaaagccgtttctgtaatgaaggagaaaactcaccgaggcagttccataggatggcaagatcctggtatcggtctgcgattccgactcgtccaacatcaatacaacctattaatttcccctcgtcaaaaataaggttatcaagtgagaaatcaccatgagtgacgactgaatccggtgagaatggcaaaagcttatgcatttctttccagacttgttcaacaggccagccattacgctcgtcatcaaaatcactcgcatcaaccaaaccgttattcattcgtgattgcgcctgagcgagacgaaatacgcgatcgctgttaaaaggacaattacaaacaggaatcgaatgcaaccggcgcaggaacactgccagcgcatcaacaatattttcacctgaatcaggatattcttctaatacctggaatgctgttttcccggggatcgcagtggtgagtaaccatgcatcatcaggagtacggataaaatgcttgatggtcggaagaggcataaattccgtcagccagtttagtctgaccatctcatctgtaacatcattggcaacgctacctttgccatgtttcagaaacaactctggcgcatcgggcttcccatacaatcgatagattgtcgcacctgattgcccgacattatcgcgagcccatttatacccatataaatcagcatccatgttggaatttaatcgcggcctcgagcaagacgtttcccgttgaatatggctcataacaccccttgtattactgtttatgtaagcagacagttttattgttcatgatgatatatttttatcttgtgcaatgtaacatcagagattttgagacacaacgtggctttccccccccccccattattgaagcatttatcagggttattgtctcatgagcggatacatatttgaatgtatttagaaaaataaacaaataggggttccgcgcacatttccccgaaaagtgccacctgacgtctaagaaaccattattatcatgacattaacctataaaaataggcgtatcacgaggccctttcgtc

SEQ ID NO: 73 - DNA, 1425 bp, Artificial Sequence
  Description of Artificial Sequence: Synthetic polynucleotide
atgggatggtcatgtatcatcctttttctagtagcaactgcaaccggtgtacattcccaggtccggctgagccagagcggaggccagatgaagaagccaggagatagtatgaggattagttgtcgagcaagcgggtatgagtttatcaactgcccaattaattgggtgcgcctggcaccaggaaagcgacctgagtggatgggatggatgaaaccacgagggggagccgtgagctacgctcgacagctgcagggaagagtcaccatgacaagggacatgtattctgagaccgctttcctggaactgaggtctctgacaagtgacgatactgcagtctacttttgcacccggggcaagtattgtacagcaagagactactataactgggatttcgaacactggggacagggaactcccgtgaccgtcagctccccgtcgaccaagggcccatcggtcttccccctggcaccctcctccaagagcacctctgggggcacagcggccctgggctgcctggtcaaggactacttccccgaacccgtgacggtgtcgtggaactcaggcgccctgaccagcggcgtgcacaccttcccggctgtcctacagtcctcaggactctactccctcagcagcgtggtgaccgtgccctccagcagcttgggcacccagacctacatctgcaacgtgaatcacaagcccagcaacaccaaggtggacaagaaagttgagcccaaatcttgtgacaaaactcacacatgcccaccgtgcccagcacctgaactcctggggggaccgtcagtcttcctcttccccccaaaacccaaggacaccctcatgatctcccggacccctgaggtcacatgcgtggtggtggacgtgagccacgaagaccctgaggtcaagttcaactggtacgtggacggcgtggaggtgcataatgccaagacaaagccgcgggaggagcagtacaacagcacgtaccgtgtggtcagcgtcctcaccgtcctgcaccaggactggctgaatggcaaggagtacaagtgcaaggtctccaacaaagccctcccagcccccatcgagaaaaccatctccaaagccaaagggcagccccgagaaccacaggtgtacaccctgcccccatcccgggatgagctgaccaagaaccaggtcagcctgacctgcctggtcaaaggcttctatcccagcgacatcgccgtggagtgggagagcaatgggcagccggagaacaactacaagaccacgcctcccgtgctggactccgacggctccttcttcctctacagcaagctcaccgtggacaagagcaggtggcagcaggggaacgtcttctcatgctccgtgatgcatgaggctctgcacaaccactacacgcagaagagcctctccctgtctccgggtaaatga

SEQ ID NO: 74 - DNA, 5838 bp, Artificial Sequence
  Description of Artificial Sequence: Synthetic polynucleotide
tcgcgcgtttcggtgatgacggtgaaaacctctgacacatgcagctcccggagacggtcacagcttgtctgtaagcggatgccgggagcagacaagcccgtcagggcgcgtcagcgggtgttggcgggtgtcggggctggcttaactatgcggcatcagagcagattgtactgagagtgcaccatatgcggtgtgaaataccgcacagatgcgtaaggagaaaataccgcatcagattggctattggccattgcatacgttgtatccatatcataatatgtacatttatattggctcatgtccaacattaccgccatgttgacattgattattgactagttattaatagtaatcaattacggggtcattagttcatagcccatatatggagttccgcgttacataacttacggtaaatggcccgcctggctgaccgcccaacgacccccgcccattgacgtcaataatgacgtatgttcccatagtaacgccaatagggactttccattgacgtcaatgggtggagtatttacggtaaactgcccacttggcagtacatcaagtgtatcatatgccaagtacgccccctattgacgtcaatgacggtaaatggcccgcctggcattatgcccagtacatgaccttatgggactttcctacttggcagtacatctacgtattagtcatcgctattaccatggtgatgcggttttggcagtacatcaatgggcgtggatagcggtttgactcacggggatttccaagtctccaccccattgacgtcaatgggagtttgttttggcaccaaaatcaacgggactttccaaaatgtcgtaacaactccgccccattgacgcaaatgggcggtaggcgtgtacggtgggaggtctatataagcagagctcgtttagtgaaccgtcagatcgcctggagacgccatccacgctgttttgacctccatagaagacaccgggaccgatccagcctccatcggctcgcatctctccttcacgcgcccgccgccctacctgaggccgccatccacgccggttgagtcgcgttctgccgcctcccgcctgtggtgcctcctgaactgcgtccgccgtctaggtaagtttaaagctcaggtcgagaccgggcctttgtccggcgctcccttggagcctacctagactcagccggctctccacgctttgcctgaccctgcttgctcaactctagttaacggtggagggcagtgtagtctgagcagtactcgttgctgccgcgcgcgccaccagacataatagctgacagactaacagactgttcctttccatgggtcttttctgcagtcaccgtcctcgacacgtgtgatcagatatcgcggccgctctagaccaccatgggatggtcatgtatcatcctttttctagtagcaactgcaaccggtgtacattcccaggtccggctgagccagagcggaggccagatgaagaagccaggagatagtatgaggattagttgtcgagcaagcgggtatgagtttatcaactgcccaattaattgggtgcgcctggcaccaggaaagcgacctgagtggatgggatggatgaaaccacgagggggagccgtgagctacgctcgacagctgcagggaagagtcaccatgacaagggacatgtattctgagaccgctttcctggaactgaggtctctgacaagtgacgatactgcagtctacttttgcacccggggcaagtattgtacagcaagagactactataactgggatttcgaacactggggacagggaactcccgtgaccgtcagctccccgtcgaccaagggcccatcggtcttccccctggcaccctcctccaagagcacctctgggggcacagcggccctgggctgcctggtcaaggactacttccccgaacccgtgacggtgtcgtggaactcaggcgccctgaccagcggcgtgcacaccttcccggctgtcctacagtcctcaggactctactccctcagcagcgtggtgaccgtgccctccagcagcttgggcacccagacctacatctgcaacgtgaatcacaagcccagcaacaccaaggtggacaagaaagttgagcccaaatcttgtgacaaaactcacacatgcccaccgtgcccagcacctgaactcctggggggaccgtcagtcttcctcttccccccaaaacccaaggacaccctcatgatctcccggacccctgaggtcacatgcgtggtggtggacgtgagccacgaagaccctgaggtcaagttcaactggtacgtggacggcgtggaggtgcataatgccaagacaaagccgcgggaggagcagtacaacagcacgtaccgtgtggtcagcgtcctcaccgtcctgcaccaggactggctgaatggcaaggagtacaagtgcaaggtctccaacaaagccctcccagcccccatcgagaaaaccatctccaaagccaaagggcagccccgagaaccacaggtgtacaccctgcccccatcccgggatgagctgaccaagaaccaggtcagcctgacctgcctggtcaaaggcttctatcccagcgacatcgccgtggagtgggagagcaatgggcagccggagaacaactacaagaccacgcctcccgtgctggactccgacggctccttcttcctctacagcaagctcaccgtggacaagagcaggtggcagcaggggaacgtcttctcatgctccgtgatgcatgaggctctgcacaaccactacacgcagaagagcctctccctgtctccgggtaaatgatgaggatccagatctgctgtgccttctagttgccagccatctgttgtttgcccctcccccgtgccttccttgaccctggaaggtgccactcccactgtcctttcctaataaaatgaggaaattgcatcgcattgtctgagtaggtgtcattctattctggggggtggggtggggcaggacagcaagggggaggattgggaagacaatagcaggcatgctggggatgcggtgggctctatgggtacccaggtgctgaagaattgacccggttcctcctgggccagaaagaagcaggcacatccccttctctgtgacacaccctgtccacgcccctggttcttagttccagccccactcataggacactcatagctcaggagggctccgccttcaatcccacccgctaaagtacttggagcggtctctccctccctcatcagcccaccaaaccaaacctagcctccaagagtgggaagaaattaaagcaagataggctattaagtgcagagggagagaaaatgcctccaacatgtgaggaagtaatgagagaaatcatagaattttaaggccatgatttaaggccatcatggccttaatcttccgcttcctcgctcactgactcgctgcgctcggtcgttcggctgcggcgagcggtatcagctcactcaaaggcggtaatacggttatccacagaatcaggggataacgcaggaaagaacatgtgagcaaaaggccagcaaaaggccaggaaccgtaaaaaggccgcgttgctggcgtttttccataggctccgcccccctgacgagcatcacaaaaatcgacgctcaagtcagaggtggcgaaacccgacaggactataaagataccaggcgtttccccctggaagctccctcgtgcgctctcctgttccgaccctgccgcttaccggatacctgtccgcctttctcccttcgggaagcgtggcgctttctcatagctcacgctgtaggtatctcagttcggtgtaggtcgttcgctccaagctgggctgtgtgcacgaaccccccgttcagcccgaccgctgcgccttatccggtaactatcgtcttgagtccaacccggtaagacacgacttatcgccactggcagcagccactggtaacaggattagcagagcgaggtatgtaggcggtgctacagagttcttgaagtggtggcctaactacggctacactagaagaacagtatttggtatctgcgctctgctgaagccagttaccttcggaaaaagagttggtagctcttgatccggcaaacaaaccaccgctggtagcggtggtttttttgtttgcaagcagcagattacgcgcagaaaaaaaggatctcaagaagatcctttgatcttttctacggggtctgacgctcagtggaacgaaaactcacgttaagggattttggtcatgagattatcaaaaaggatcttcacctagatccttttaaattaaaaatgaagttttaaatcaatctaaagtatatatgagtaaacttggtctgacagttaccaatgcttaatcagtgaggcacctatctcagcgatctgtctatttcgttcatccatagttgcctgactcggggggggggggcgctgaggtctgcctcgtgaagaaggtgttgctgactcataccaggcctgaatcgccccatcatccagccagaaagtgagggagccacggttgatgagagctttgttgtaggtggaccagttggtgattttgaacttttgctttgccacggaacggtctgcgttgtcgggaagatgcgtgatctgatccttcaactcagcaaaagttcgatttattcaacaaagccgccgtcccgtcaagtcagcgtaatgctctgccagtgttacaaccaattaaccaattctgattagaaaaactcatcgagcatcaaatgaaactgcaatttattcatatcaggattatcaataccatatttttgaaaaagccgtttctgtaatgaaggagaaaactcaccgaggcagttccataggatggcaagatcctggtatcggtctgcgattccgactcgtccaacatcaatacaacctattaatttcccctcgtcaaaaataaggttatcaagtgagaaatcaccatgagtgacgactgaatccggtgagaatggcaaaagcttatgcatttctttccagacttgttcaacaggccagccattacgctcgtcatcaaaatcactcgcatcaaccaaaccgttattcattcgtgattgcgcctgagcgagacgaaatacgcgatcgctgttaaaaggacaattacaaacaggaatcgaatgcaaccggcgcaggaacactgccagcgcatcaacaatattttcacctgaatcaggatattcttctaatacctggaatgctgttttcccggggatcgcagtggtgagtaaccatgcatcatcaggagtacggataaaatgcttgatggtcggaagaggcataaattccgtcagccagtttagtctgaccatctcatctgtaacatcattggcaacgctacctttgccatgtttcagaaacaactctggcgcatcgggcttcccatacaatcgatagattgtcgcacctgattgcccgacattatcgcgagcccatttatacccatataaatcagcatccatgttggaatttaatcgcggcctcgagcaagacgtttcccgttgaatatggctcataacaccccttgtattactgtttatgtaagcagacagttttattgttcatgatgatatatttttatcttgtgcaatgtaacatcagagattttgagacacaacgtggctttccccccccccccattattgaagcatttatcagggttattgtctcatgagcggatacatatttgaatgtatttagaaaaataaacaaataggggttccgcgcacatttccccgaaaagtgccacctgacgtctaagaaaccattattatcatgacattaacctataaaaataggcgtatcacgaggccctttcgtc

SEQ ID NO: 75 - DNA, 1425 bp, Artificial Sequence
  Description of Artificial Sequence: Synthetic polynucleotide
atgggatggtcatgtatcatcctttttctagtagcaactgcaaccggtgtacattcccaggtccagctgagccagagcggaggccagatgaagaagccaggagatagtatgaggattagttgtcgagcaagcgggtatgagtttatcaactgcccaattaattggatacgcctggcaccaggaaagcgacctgagtggatgggatggatgaaaccacgagggggagccgtgagctacgctcgacagctgcagggaagagtcaccatgacaagggacatgtattctgagaccgctttcctggaactgaggtctctgacaagtgacgatactgcagtctacttttgcacccggggcaagtattgtacagcaagagactactataactgggatttcgaacactggggacagggaactcccgtgaccgtcagctccccgtcgaccaagggcccatcggtcttccccctggcaccctcctccaagagcacctctgggggcacagcggccctgggctgcctggtcaaggactacttccccgaacccgtgacggtgtcgtggaactcaggcgccctgaccagcggcgtgcacaccttcccggctgtcctacagtcctcaggactctactccctcagcagcgtggtgaccgtgccctccagcagcttgggcacccagacctacatctgcaacgtgaatcacaagcccagcaacaccaaggtggacaagaaagttgagcccaaatcttgtgacaaaactcacacatgcccaccgtgcccagcacctgaactcctggggggaccgtcagtcttcctcttccccccaaaacccaaggacaccctcatgatctcccggacccctgaggtcacatgcgtggtggtggacgtgagccacgaagaccctgaggtcaagttcaactggtacgtggacggcgtggaggtgcataatgccaagacaaagccgcgggaggagcagtacaacagcacgtaccgtgtggtcagcgtcctcaccgtcctgcaccaggactggctgaatggcaaggagtacaagtgcaaggtctccaacaaagccctcccagcccccatcgagaaaaccatctccaaagccaaagggcagccccgagaaccacaggtgtacaccctgcccccatcccgggatgagctgaccaagaaccaggtcagcctgacctgcctggtcaaaggcttctatcccagcgacatcgccgtggagtgggagagcaatgggcagccggagaacaactacaagaccacgcctcccgtgctggactccgacggctccttcttcctctacagcaagctcaccgtggacaagagcaggtggcagcaggggaacgtcttctcatgctccgtgatgcatgaggctctgcacaaccactacacgcagaagagcctctccctgtctccgggtaaatga

SEQ ID NO: 76 - DNA, 5838 bp, Artificial Sequence
  Description of Artificial Sequence: Synthetic polynucleotide
tcgcgcgtttcggtgatgacggtgaaaacctctgacacatgcagctcccggagacggtcacagcttgtctgtaagcggatgccgggagcagacaagcccgtcagggcgcgtcagcgggtgttggcgggtgtcggggctggcttaactatgcggcatcagagcagattgtactgagagtgcaccatatgcggtgtgaaataccgcacagatgcgtaaggagaaaataccgcatcagattggctattggccattgcatacgttgtatccatatcataatatgtacatttatattggctcatgtccaacattaccgccatgttgacattgattattgactagttattaatagtaatcaattacggggtcattagttcatagcccatatatggagttccgcgttacataacttacggtaaatggcccgcctggctgaccgcccaacgacccccgcccattgacgtcaataatgacgtatgttcccatagtaacgccaatagggactttccattgacgtcaatgggtggagtatttacggtaaactgcccacttggcagtacatcaagtgtatcatatgccaagtacgccccctattgacgtcaatgacggtaaatggcccgcctggcattatgcccagtacatgaccttatgggactttcctacttggcagtacatctacgtattagtcatcgctattaccatggtgatgcggttttggcagtacatcaatgggcgtggatagcggtttgactcacggggatttccaagtctccaccccattgacgtcaatgggagtttgttttggcaccaaaatcaacgggactttccaaaatgtcgtaacaactccgccccattgacgcaaatgggcggtaggcgtgtacggtgggaggtctatataagcagagctcgtttagtgaaccgtcagatcgcctggagacgccatccacgctgttttgacctccatagaagacaccgggaccgatccagcctccatcggctcgcatctctccttcacgcgcccgccgccctacctgaggccgccatccacgccggttgagtcgcgttctgccgcctcccgcctgtggtgcctcctgaactgcgtccgccgtctaggtaagtttaaagctcaggtcgagaccgggcctttgtccggcgctcccttggagcctacctagactcagccggctctccacgctttgcctgaccctgcttgctcaactctagttaacggtggagggcagtgtagtctgagcagtactcgttgctgccgcgcgcgccaccagacataatagctgacagactaacagactgttcctttccatgggtcttttctgcagtcaccgtcctcgacacgtgtgatcagatatcgcggccgctctagaccaccatgggatggtcatgtatcatcctttttctagtagcaactgcaaccggtgtacattcccaggtccagctgagccagagcggaggccagatgaagaagccaggagatagtatgaggattagttgtcgagcaagcgggtatgagtttatcaactgcccaattaattggatacgcctggcaccaggaaagcgacctgagtggatgggatggatgaaaccacgagggggagccgtgagctacgctcgacagctgcagggaagagtcaccatgacaagggacatgtattctgagaccgctttcctggaactgaggtctctgacaagtgacgatactgcagtctacttttgcacccggggcaagtattgtacagcaagagactactataactgggatttcgaacactggggacagggaactcccgtgaccgtcagctccccgtcgaccaagggcccatcggtcttccccctggcaccctcctccaagagcacctctgggggcacagcggccctgggctgcctggtcaaggactacttccccgaacccgtgacggtgtcgtggaactcaggcgccctgaccagcggcgtgcacaccttcccggctgtcctacagtcctcaggactctactccctcagcagcgtggtgaccgtgccctccagcagcttgggcacccagacctacatctgcaacgtgaatcacaagcccagcaacaccaaggtggacaagaaagttgagcccaaatcttgtgacaaaactcacacatgcccaccgtgcccagcacctgaactcctggggggaccgtcagtcttcctcttccccccaaaacccaaggacaccctcatgatctcccggacccctgaggtcacatgcgtggtggtggacgtgagccacgaagaccctgaggtcaagttcaactggtacgtggacggcgtggaggtgcataatgccaagacaaagccgcgggaggagcagtacaacagcacgtaccgtgtggtcagcgtcctcaccgtcctgcaccaggactggctgaatggcaaggagtacaagtgcaaggtctccaacaaagccctcccagcccccatcgagaaaaccatctccaaagccaaagggcagccccgagaaccacaggtgtacaccctgcccccatcccgggatgagctgaccaagaaccaggtcagcctgacctgcctggtcaaaggcttctatcccagcgacatcgccgtggagtgggagagcaatgggcagccggagaacaactacaagaccacgcctcccgtgctggactccgacggctccttcttcctctacagcaagctcaccgtggacaagagcaggtggcagcaggggaacgtcttctcatgctccgtgatgcatgaggctctgcacaaccactacacgcagaagagcctctccctgtctccgggtaaatgatgaggatccagatctgctgtgccttctagttgccagccatctgttgtttgcccctcccccgtgccttccttgaccctggaaggtgccactcccactgtcctttcctaataaaatgaggaaattgcatcgcattgtctgagtaggtgtcattctattctggggggtggggtggggcaggacagcaagggggaggattgggaagacaatagcaggcatgctggggatgcggtgggctctatgggtacccaggtgctgaagaattgacccggttcctcctgggccagaaagaagcaggcacatccccttctctgtgacacaccctgtccacgcccctggttcttagttccagccccactcataggacactcatagctcaggagggctccgccttcaatcccacccgctaaagtacttggagcggtctctccctccctcatcagcccaccaaaccaaacctagcctccaagagtgggaagaaattaaagcaagataggctattaagtgcagagggagagaaaatgcctccaacatgtgaggaagtaatgagagaaatcatagaattttaaggccatgatttaaggccatcatggccttaatcttccgcttcctcgctcactgactcgctgcgctcggtcgttcggctgcggcgagcggtatcagctcactcaaaggcggtaatacggttatccacagaatcaggggataacgcaggaaagaacatgtgagcaaaaggccagcaaaaggccaggaaccgtaaaaaggccgcgttgctggcgtttttccataggctccgcccccctgacgagcatcacaaaaatcgacgctcaagtcagaggtggcgaaacccgacaggactataaagataccaggcgtttccccctggaagctccctcgtgcgctctcctgttccgaccctgccgcttaccggatacctgtccgcctttctcccttcgggaagcgtggcgctttctcatagctcacgctgtaggtatctcagttcggtgtaggtcgttcgctccaagctgggctgtgtgcacgaaccccccgttcagcccgaccgctgcgccttatccggtaactatcgtcttgagtccaacccggtaagacacgacttatcgccactggcagcagccactggtaacaggattagcagagcgaggtatgtaggcggtgctacagagttcttgaagtggtggcctaactacggctacactagaagaacagtatttggtatctgcgctctgctgaagccagttaccttcggaaaaagagttggtagctcttgatccggcaaacaaaccaccgctggtagcggtggtttttttgtttgcaagcagcagattacgcgcagaaaaaaaggatctcaagaagatcctttgatcttttctacggggtctgacgctcagtggaacgaaaactcacgttaagggattttggtcatgagattatcaaaaaggatcttcacctagatccttttaaattaaaaatgaagttttaaatcaatctaaagtatatatgagtaaacttggtctgacagttaccaatgcttaatcagtgaggcacctatctcagcgatctgtctatttcgttcatccatagttgcctgactcggggggggggggcgctgaggtctgcctcgtgaagaaggtgttgctgactcataccaggcctgaatcgccccatcatccagccagaaagtgagggagccacggttgatgagagctttgttgtaggtggaccagttggtgattttgaacttttgctttgccacggaacggtctgcgttgtcgggaagatgcgtgatctgatccttcaactcagcaaaagttcgatttattcaacaaagccgccgtcccgtcaagtcagcgtaatgctctgccagtgttacaaccaattaaccaattctgattagaaaaactcatcgagcatcaaatgaaactgcaatttattcatatcaggattatcaataccatatttttgaaaaagccgtttctgtaatgaaggagaaaactcaccgaggcagttccataggatggcaagatcctggtatcggtctgcgattccgactcgtccaacatcaatacaacctattaatttcccctcgtcaaaaataaggttatcaagtgagaaatcaccatgagtgacgactgaatccggtgagaatggcaaaagcttatgcatttctttccagacttgttcaacaggccagccattacgctcgtcatcaaaatcactcgcatcaaccaaaccgttattcattcgtgattgcgcctgagcgagacgaaatacgcgatcgctgttaaaaggacaattacaaacaggaatcgaatgcaaccggcgcaggaacactgccagcgcatcaacaatattttcacctgaatcaggatattcttctaatacctggaatgctgttttcccggggatcgcagtggtgagtaaccatgcatcatcaggagtacggataaaatgcttgatggtcggaagaggcataaattccgtcagccagtttagtctgaccatctcatctgtaacatcattggcaacgctacctttgccatgtttcagaaacaactctggcgcatcgggcttcccatacaatcgatagattgtcgcacctgattgcccgacattatcgcgagcccatttatacccatataaatcagcatccatgttggaatttaatcgcggcctcgagcaagacgtttcccgttgaatatggctcataacaccccttgtattactgtttatgtaagcagacagttttattgttcatgatgatatatttttatcttgtgcaatgtaacatcagagattttgagacacaacgtggctttccccccccccccattattgaagcatttatcagggttattgtctcatgagcggatacatatttgaatgtatttagaaaaataaacaaataggggttccgcgcacatttccccgaaaagtgccacctgacgtctaagaaaccattattatcatgacattaacctataaaaataggcgtatcacgaggccctttcgtc

SEQ ID NO: 77 - DNA, 1425 bp, Artificial Sequence
  Description of Artificial Sequence: Synthetic polynucleotide
atgggatggtcatgtatcatcctttttctagtagcaactgcaaccggtgtacattcccaggtccagctgagccagagcggaggccagatgaagaagccaggagatagtatgaggattagttgtcgagcaagcgggtatgagtttatcaactgcccaattaattgggtgcgcctggcaccaggaaagcgacctgagtggatgggatggatgaaaccacgagggggagccgtgaactacgctcgacagctgcagggaagagtcaccatgacaagggacatgtattctgagaccgctttcctggaactgaggtctctgacaagtgacgatactgcagtctacttttgcgcccggggcaagtattgtacagcaagagactactataactgggatttcgaacactggggacagggaactcccgtgaccgtcagctccccgtcgaccaagggcccatcggtcttccccctggcaccctcctccaagagcacctctgggggcacagcggccctgggctgcctggtcaaggactacttccccgaacccgtgacggtgtcgtggaactcaggcgccctgaccagcggcgtgcacaccttcccggctgtcctacagtcctcaggactctactccctcagcagcgtggtgaccgtgccctccagcagcttgggcacccagacctacatctgcaacgtgaatcacaagcccagcaacaccaaggtggacaagaaagttgagcccaaatcttgtgacaaaactcacacatgcccaccgtgcccagcacctgaactcctggggggaccgtcagtcttcctcttccccccaaaacccaaggacaccctcatgatctcccggacccctgaggtcacatgcgtggtggtggacgtgagccacgaagaccctgaggtcaagttcaactggtacgtggacggcgtggaggtgcataatgccaagacaaagccgcgggaggagcagtacaacagcacgtaccgtgtggtcagcgtcctcaccgtcctgcaccaggactggctgaatggcaaggagtacaagtgcaaggtctccaacaaagccctcccagcccccatcgagaaaaccatctccaaagccaaagggcagccccgagaaccacaggtgtacaccctgcccccatcccgggatgagctgaccaagaaccaggtcagcctgacctgcctggtcaaaggcttctatcccagcgacatcgccgtggagtgggagagcaatgggcagccggagaacaactacaagaccacgcctcccgtgctggactccgacggctccttcttcctctacagcaagctcaccgtggacaagagcaggtggcagcaggggaacgtcttctcatgctccgtgatgcatgaggctctgcacaaccactacacgcagaagagcctctccctgtctccgggtaaatga

SEQ ID NO: 78 - DNA, 5838 bp, Artificial Sequence
  Description of Artificial Sequence: Synthetic polynucleotide
tcgcgcgtttcggtgatgacggtgaaaacctctgacacatgcagctcccggagacggtcacagcttgtctgtaagcggatgccgggagcagacaagcccgtcagggcgcgtcagcgggtgttggcgggtgtcggggctggcttaactatgcggcatcagagcagattgtactgagagtgcaccatatgcggtgtgaaataccgcacagatgcgtaaggagaaaataccgcatcagattggctattggccattgcatacgttgtatccatatcataatatgtacatttatattggctcatgtccaacattaccgccatgttgacattgattattgactagttattaatagtaatcaattacggggtcattagttcatagcccatatatggagttccgcgttacataacttacggtaaatggcccgcctggctgaccgcccaacgacccccgcccattgacgtcaataatgacgtatgttcccatagtaacgccaatagggactttccattgacgtcaatgggtggagtatttacggtaaactgcccacttggcagtacatcaagtgtatcatatgccaagtacgccccctattgacgtcaatgacggtaaatggcccgcctggcattatgcccagtacatgaccttatgggactttcctacttggcagtacatctacgtattagtcatcgctattaccatggtgatgcggttttggcagtacatcaatgggcgtggatagcggtttgactcacggggatttccaagtctccaccccattgacgtcaatgggagtttgttttggcaccaaaatcaacgggactttccaaaatgtcgtaacaactccgccccattgacgcaaatgggcggtaggcgtgtacggtgggaggtctatataagcagagctcgtttagtgaaccgtcagatcgcctggagacgccatccacgctgttttgacctccatagaagacaccgggaccgatccagcctccatcggctcgcatctctccttcacgcgcccgccgccctacctgaggccgccatccacgccggttgagtcgcgttctgccgcctcccgcctgtggtgcctcctgaactgcgtccgccgtctaggtaagtttaaagctcaggtcgagaccgggcctttgtccggcgctcccttggagcctacctagactcagccggctctccacgctttgcctgaccctgcttgctcaactctagttaacggtggagggcagtgtagtctgagcagtactcgttgctgccgcgcgcgccaccagacataatagctgacagactaacagactgttcctttccatgggtcttttctgcagtcaccgtcctcgacacgtgtgatcagatatcgcggccgctctagaccaccatgggatggtcatgtatcatcctttttctagtagcaactgcaaccggtgtacattcccaggtccagctgagccagagcggaggccagatgaagaagccaggagatagtatgaggattagttgtcgagcaagcgggtatgagtttatcaactgcccaattaattgggtgcgcctggcaccaggaaagcgacctgagtggatgggatggatgaaaccacgagggggagccgtgaactacgctcgacagctgcagggaagagtcaccatgacaagggacatgtattctgagaccgctttcctggaactgaggtctctgacaagtgacgatactgcagtctacttttgcgcccggggcaagtattgtacagcaagagactactataactgggatttcgaacactggggacagggaactcccgtgaccgtcagctccccgtcgaccaagggcccatcggtcttccccctggcaccctcctccaagagcacctctgggggcacagcggccctgggctgcctggtcaaggactacttccccgaacccgtgacggtgtcgtggaactcaggcgccctgaccagcggcgtgcacaccttcccggctgtcctacagtcctcaggactctactccctcagcagcgtggtgaccgtgccctccagcagcttgggcacccagacctacatctgcaacgtgaatcacaagcccagcaacaccaaggtggacaagaaagttgagcccaaatcttgtgacaaaactcacacatgcccaccgtgcccagcacctgaactcctggggggaccgtcagtcttcctcttccccccaaaacccaaggacaccctcatgatctcccggacccctgaggtcacatgcgtggtggtggacgtgagccacgaagaccctgaggtcaagttcaactggtacgtggacggcgtggaggtgcataatgccaagacaaagccgcgggaggagcagtacaacagcacgtaccgtgtggtcagcgtcctcaccgtcctgcaccaggactggctgaatggcaaggagtacaagtgcaaggtctccaacaaagccctcccagcccccatcgagaaaaccatctccaaagccaaagggcagccccgagaaccacaggtgtacaccctgcccccatcccgggatgagctgaccaagaaccaggtcagcctgacctgcctggtcaaaggcttctatcccagcgacatcgccgtggagtgggagagcaatgggcagccggagaacaactacaagaccacgcctcccgtgctggactccgacggctccttcttcctctacagcaagctcaccgtggacaagagcaggtggcagcaggggaacgtcttctcatgctccgtgatgcatgaggctctgcacaaccactacacgcagaagagcctctccctgtctccgggtaaatgatgaggatccagatctgctgtgccttctagttgccagccatctgttgtttgcccctcccccgtgccttccttgaccctggaaggtgccactcccactgtcctttcctaataaaatgaggaaattgcatcgcattgtctgagtaggtgtcattctattctggggggtggggtggggcaggacagcaagggggaggattgggaagacaatagcaggcatgctggggatgcggtgggctctatgggtacccaggtgctgaagaattgacccggttcctcctgggccagaaagaagcaggcacatccccttctctgtgacacaccctgtccacgcccctggttcttagttccagccccactcataggacactcatagctcaggagggctccgccttcaatcccacccgctaaagtacttggagcggtctctccctccctcatcagcccaccaaaccaaacctagcctccaagagtgggaagaaattaaagcaagataggctattaagtgcagagggagagaaaatgcctccaacatgtgaggaagtaatgagagaaatcatagaattttaaggccatgatttaaggccatcatggccttaatcttccgcttcctcgctcactgactcgctgcgctcggtcgttcggctgcggcgagcggtatcagctcactcaaaggcggtaatacggttatccacagaatcaggggataacgcaggaaagaacatgtgagcaaaaggccagcaaaaggccaggaaccgtaaaaaggccgcgttgctggcgtttttccataggctccgcccccctgacgagcatcacaaaaatcgacgctcaagtcagaggtggcgaaacccgacaggactataaagataccaggcgtttccccctggaagctccctcgtgcgctctcctgttccgaccctgccgcttaccggatacctgtccgcctttctcccttcgggaagcgtggcgctttctcatagctcacgctgtaggtatctcagttcggtgtaggtcgttcgctccaagctgggctgtgtgcacgaaccccccgttcagcccgaccgctgcgccttatccggtaactatcgtcttgagtccaacccggtaagacacgacttatcgccactggcagcagccactggtaacaggattagcagagcgaggtatgtaggcggtgctacagagttcttgaagtggtggcctaactacggctacactagaagaacagtatttggtatctgcgctctgctgaagccagttaccttcggaaaaagagttggtagctcttgatccggcaaacaaaccaccgctggtagcggtggtttttttgtttgcaagcagcagattacgcgcagaaaaaaaggatctcaagaagatcctttgatcttttctacggggtctgacgctcagtggaacgaaaactcacgttaagggattttggtcatgagattatcaaaaaggatcttcacctagatccttttaaattaaaaatgaagttttaaatcaatctaaagtatatatgagtaaacttggtctgacagttaccaatgcttaatcagtgaggcacctatctcagcgatctgtctatttcgttcatccatagttgcctgactcggggggggggggcgctgaggtctgcctcgtgaagaaggtgttgctgactcataccaggcctgaatcgccccatcatccagccagaaagtgagggagccacggttgatgagagctttgttgtaggtggaccagttggtgattttgaacttttgctttgccacggaacggtctgcgttgtcgggaagatgcgtgatctgatccttcaactcagcaaaagttcgatttattcaacaaagccgccgtcccgtcaagtcagcgtaatgctctgccagtgttacaaccaattaaccaattctgattagaaaaactcatcgagcatcaaatgaaactgcaatttattcatatcaggattatcaataccatatttttgaaaaagccgtttctgtaatgaaggagaaaactcaccgaggcagttccataggatggcaagatcctggtatcggtctgcgattccgactcgtccaacatcaatacaacctattaatttcccctcgtcaaaaataaggttatcaagtgagaaatcaccatgagtgacgactgaatccggtgagaatggcaaaagcttatgcatttctttccagacttgttcaacaggccagccattacgctcgtcatcaaaatcactcgcatcaaccaaaccgttattcattcgtgattgcgcctgagcgagacgaaatacgcgatcgctgttaaaaggacaattacaaacaggaatcgaatgcaaccggcgcaggaacactgccagcgcatcaacaatattttcacctgaatcaggatattcttctaatacctggaatgctgttttcccggggatcgcagtggtgagtaaccatgcatcatcaggagtacggataaaatgcttgatggtcggaagaggcataaattccgtcagccagtttagtctgaccatctcatctgtaacatcattggcaacgctacctttgccatgtttcagaaacaactctggcgcatcgggcttcccatacaatcgatagattgtcgcacctgattgcccgacattatcgcgagcccatttatacccatataaatcagcatccatgttggaatttaatcgcggcctcgagcaagacgtttcccgttgaatatggctcataacaccccttgtattactgtttatgtaagcagacagttttattgttcatgatgatatatttttatcttgtgcaatgtaacatcagagattttgagacacaacgtggctttccccccccccccattattgaagcatttatcagggttattgtctcatgagcggatacatatttgaatgtatttagaaaaataaacaaataggggttccgcgcacatttccccgaaaagtgccacctgacgtctaagaaaccattattatcatgacattaacctataaaaataggcgtatcacgaggccctttcgtc

SEQ ID NO: 79 - DNA, 1425 bp, Artificial Sequence
  Description of Artificial Sequence: Synthetic polynucleotide
atgggatggtcatgtatcatcctttttctagtagcaactgcaaccggtgtacattcccaggtccggctgagccagagcggaggccagatgaagaagccaggagatagtatgaggattagttgtcgagcaagcgggtatgagtttatcaactgcccaattaattgggtgcgcctggcaccaggaaagcgacctgagtggatgggatggatgaaaccacgagggggagccgtgaactacgctcgacagctgcagggaagagtcaccatgacaagggacatgtattctgagaccgctttcctggaactgaggtctctgacaagtgacgatactgcagtctacttttgcgcccggggcaagtattgtacagcaagagactactataactgggatttcgaacactggggacagggaactcccgtgaccgtcagctccccgtcgaccaagggcccatcggtcttccccctggcaccctcctccaagagcacctctgggggcacagcggccctgggctgcctggtcaaggactacttccccgaacccgtgacggtgtcgtggaactcaggcgccctgaccagcggcgtgcacaccttcccggctgtcctacagtcctcaggactctactccctcagcagcgtggtgaccgtgccctccagcagcttgggcacccagacctacatctgcaacgtgaatcacaagcccagcaacaccaaggtggacaagaaagttgagcccaaatcttgtgacaaaactcacacatgcccaccgtgcccagcacctgaactcctggggggaccgtcagtcttcctcttccccccaaaacccaaggacaccctcatgatctcccggacccctgaggtcacatgcgtggtggtggacgtgagccacgaagaccctgaggtcaagttcaactggtacgtggacggcgtggaggtgcataatgccaagacaaagccgcgggaggagcagtacaacagcacgtaccgtgtggtcagcgtcctcaccgtcctgcaccaggactggctgaatggcaaggagtacaagtgcaaggtctccaacaaagccctcccagcccccatcgagaaaaccatctccaaagccaaagggcagccccgagaaccacaggtgtacaccctgcccccatcccgggatgagctgaccaagaaccaggtcagcctgacctgcctggtcaaaggcttctatcccagcgacatcgccgtggagtgggagagcaatgggcagccggagaacaactacaagaccacgcctcccgtgctggactccgacggctccttcttcctctacagcaagctcaccgtggacaagagcaggtggcagcaggggaacgtcttctcatgctccgtgatgcatgaggctctgcacaaccactacacgcagaagagcctctccctgtctccgggtaaatga

SEQ ID NO: 80 - DNA, 5838 bp, Artificial Sequence
  Description of Artificial Sequence: Synthetic polynucleotide
tcgcgcgtttcggtgatgacggtgaaaacctctgacacatgcagctcccggagacggtcacagcttgtctgtaagcggatgccgggagcagacaagcccgtcagggcgcgtcagcgggtgttggcgggtgtcggggctggcttaactatgcggcatcagagcagattgtactgagagtgcaccatatgcggtgtgaaataccgcacagatgcgtaaggagaaaataccgcatcagattggctattggccattgcatacgttgtatccatatcataatatgtacatttatattggctcatgtccaacattaccgccatgttgacattgattattgactagttattaatagtaatcaattacggggtcattagttcatagcccatatatggagttccgcgttacataacttacggtaaatggcccgcctggctgaccgcccaacgacccccgcccattgacgtcaataatgacgtatgttcccatagtaacgccaatagggactttccattgacgtcaatgggtggagtatttacggtaaactgcccacttggcagtacatcaagtgtatcatatgccaagtacgccccctattgacgtcaatgacggtaaatggcccgcctggcattatgcccagtacatgaccttatgggactttcctacttggcagtacatctacgtattagtcatcgctattaccatggtgatgcggttttggcagtacatcaatgggcgtggatagcggtttgactcacggggatttccaagtctccaccccattgacgtcaatgggagtttgttttggcaccaaaatcaacgggactttccaaaatgtcgtaacaactccgccccattgacgcaaatgggcggtaggcgtgtacggtgggaggtctatataagcagagctcgtttagtgaaccgtcagatcgcctggagacgccatccacgctgttttgacctccatagaagacaccgggaccgatccagcctccatcggctcgcatctctccttcacgcgcccgccgccctacctgaggccgccatccacgccggttgagtcgcgttctgccgcctcccgcctgtggtgcctcctgaactgcgtccgccgtctaggtaagtttaaagctcaggtcgagaccgggcctttgtccggcgctcccttggagcctacctagactcagccggctctccacgctttgcctgaccctgcttgctcaactctagttaacggtggagggcagtgtagtctgagcagtactcgttgctgccgcgcgcgccaccagacataatagctgacagactaacagactgttcctttccatgggtcttttctgcagtcaccgtcctcgacacgtgtgatcagatatcgcggccgctctagaccaccatgggatggtcatgtatcatcctttttctagtagcaactgcaaccggtgtacattcccaggtccggctgagccagagcggaggccagatgaagaagccaggagatagtatgaggattagttgtcgagcaagcgggtatgagtttatcaactgcccaattaattgggtgcgcctggcaccaggaaagcgacctgagtggatgggatggatgaaaccacgagggggagccgtgaactacgctcgacagctgcagggaagagtcaccatgacaagggacatgtattctgagaccgctttcctggaactgaggtctctgacaagtgacgatactgcagtctacttttgcgcccggggcaagtattgtacagcaagagactactataactgggatttcgaacactggggacagggaactcccgtgaccgtcagctccccgtcgaccaagggcccatcggtcttccccctggcaccctcctccaagagcacctctgggggcacagcggccctgggctgcctggtcaaggactacttccccgaacccgtgacggtgtcgtggaactcaggcgccctgaccagcggcgtgcacaccttcccggctgtcctacagtcctcaggactctactccctcagcagcgtggtgaccgtgccctccagcagcttgggcacccagacctacatctgcaacgtgaatcacaagcccagcaacaccaaggtggacaagaaagttgagcccaaatcttgtgacaaaactcacacatgcccaccgtgcccagcacctgaactcctggggggaccgtcagtcttcctcttccccccaaaacccaaggacaccctcatgatctcccggacccctgaggtcacatgcgtggtggtggacgtgagccacgaagaccctgaggtcaagttcaactggtacgtggacggcgtggaggtgcataatgccaagacaaagccgcgggaggagcagtacaacagcacgtaccgtgtggtcagcgtcctcaccgtcctgcaccaggactggctgaatggcaaggagtacaagtgcaaggtctccaacaaagccctcccagcccccatcgagaaaaccatctccaaagccaaagggcagccccgagaaccacaggtgtacaccctgcccccatcccgggatgagctgaccaagaaccaggtcagcctgacctgcctggtcaaaggcttctatcccagcgacatcgccgtggagtgggagagcaatgggcagccggagaacaactacaagaccacgcctcccgtgctggactccgacggctccttcttcctctacagcaagctcaccgtggacaagagcaggtggcagcaggggaacgtcttctcatgctccgtgatgcatgaggctctgcacaaccactacacgcagaagagcctctccctgtctccgggtaaatgatgaggatccagatctgctgtgccttctagttgccagccatctgttgtttgcccctcccccgtgccttccttgaccctggaaggtgccactcccactgtcctttcctaataaaatgaggaaattgcatcgcattgtctgagtaggtgtcattctattctggggggtggggtggggcaggacagcaagggggaggattgggaagacaatagcaggcatgctggggatgcggtgggctctatgggtacccaggtgctgaagaattgacccggttcctcctgggccagaaagaagcaggcacatccccttctctgtgacacaccctgtccacgcccctggttcttagttccagccccactcataggacactcatagctcaggagggctccgccttcaatcccacccgctaaagtacttggagcggtctctccctccctcatcagcccaccaaaccaaacctagcctccaagagtgggaagaaattaaagcaagataggctattaagtgcagagggagagaaaatgcctccaacatgtgaggaagtaatgagagaaatcatagaattttaaggccatgatttaaggccatcatggccttaatcttccgcttcctcgctcactgactcgctgcgctcggtcgttcggctgcggcgagcggtatcagctcactcaaaggcggtaatacggttatccacagaatcaggggataacgcaggaaagaacatgtgagcaaaaggccagcaaaaggccaggaaccgtaaaaaggccgcgttgctggcgtttttccataggctccgcccccctgacgagcatcacaaaaatcgacgctcaagtcagaggtggcgaaacccgacaggactataaagataccaggcgtttccccctggaagctccctcgtgcgctctcctgttccgaccctgccgcttaccggatacctgtccgcctttctcccttcgggaagcgtggcgctttctcatagctcacgctgtaggtatctcagttcggtgtaggtcgttcgctccaagctgggctgtgtgcacgaaccccccgttcagcccgaccgctgcgccttatccggtaactatcgtcttgagtccaacccggtaagacacgacttatcgccactggcagcagccactggtaacaggattagcagagcgaggtatgtaggcggtgctacagagttcttgaagtggtggcctaactacggctacactagaagaacagtatttggtatctgcgctctgctgaagccagttaccttcggaaaaagagttggtagctcttgatccggcaaacaaaccaccgctggtagcggtggtttttttgtttgcaagcagcagattacgcgcagaaaaaaaggatctcaagaagatcctttgatcttttctacggggtctgacgctcagtggaacgaaaactcacgttaagggattttggtcatgagattatcaaaaaggatcttcacctagatccttttaaattaaaaatgaagttttaaatcaatctaaagtatatatgagtaaacttggtctgacagttaccaatgcttaatcagtgaggcacctatctcagcgatctgtctatttcgttcatccatagttgcctgactcggggggggggggcgctgaggtctgcctcgtgaagaaggtgttgctgactcataccaggcctgaatcgccccatcatccagccagaaagtgagggagccacggttgatgagagctttgttgtaggtggaccagttggtgattttgaacttttgctttgccacggaacggtctgcgttgtcgggaagatgcgtgatctgatccttcaactcagcaaaagttcgatttattcaacaaagccgccgtcccgtcaagtcagcgtaatgctctgccagtgttacaaccaattaaccaattctgattagaaaaactcatcgagcatcaaatgaaactgcaatttattcatatcaggattatcaataccatatttttgaaaaagccgtttctgtaatgaaggagaaaactcaccgaggcagttccataggatggcaagatcctggtatcggtctgcgattccgactcgtccaacatcaatacaacctattaatttcccctcgtcaaaaataaggttatcaagtgagaaatcaccatgagtgacgactgaatccggtgagaatggcaaaagcttatgcatttctttccagacttgttcaacaggccagccattacgctcgtcatcaaaatcactcgcatcaaccaaaccgttattcattcgtgattgcgcctgagcgagacgaaatacgcgatcgctgttaaaaggacaattacaaacaggaatcgaatgcaaccggcgcaggaacactgccagcgcatcaacaatattttcacctgaatcaggatattcttctaatacctggaatgctgttttcccggggatcgcagtggtgagtaaccatgcatcatcaggagtacggataaaatgcttgatggtcggaagaggcataaattccgtcagccagtttagtctgaccatctcatctgtaacatcattggcaacgctacctttgccatgtttcagaaacaactctggcgcatcgggcttcccatacaatcgatagattgtcgcacctgattgcccgacattatcgcgagcccatttatacccatataaatcagcatccatgttggaatttaatcgcggcctcgagcaagacgtttcccgttgaatatggctcataacaccccttgtattactgtttatgtaagcagacagttttattgttcatgatgatatatttttatcttgtgcaatgtaacatcagagattttgagacacaacgtggctttccccccccccccattattgaagcatttatcagggttattgtctcatgagcggatacatatttgaatgtatttagaaaaataaacaaataggggttccgcgcacatttccccgaaaagtgccacctgacgtctaagaaaccattattatcatgacattaacctataaaaataggcgtatcacgaggccctttcgtc

SEQ ID NO: 81 - DNA, 1425 bp, Artificial Sequence
  Description of Artificial Sequence: Synthetic polynucleotide
atgggatggtcatgtatcatcctttttctagtagcaactgcaaccggtgtacattcccaggtccagctgagccagagcggaggccagatgaagaagccaggagatagtatgaggattagttgtcgagcaagcgggtatgagtttatcaactgcccaattaattggatacgcctggcaccaggaaagcgacctgagtggatgggatggatgaaaccacgagggggagccgtgaactacgctcgacagctgcagggaagagtcaccatgacaagggacatgtattctgagaccgctttcctggaactgaggtctctgacaagtgacgatactgcagtctacttttgcgcccggggcaagtattgtacagcaagagactactataactgggatttcgaacactggggacagggaactcccgtgaccgtcagctccccgtcgaccaagggcccatcggtcttccccctggcaccctcctccaagagcacctctgggggcacagcggccctgggctgcctggtcaaggactacttccccgaacccgtgacggtgtcgtggaactcaggcgccctgaccagcggcgtgcacaccttcccggctgtcctacagtcctcaggactctactccctcagcagcgtggtgaccgtgccctccagcagcttgggcacccagacctacatctgcaacgtgaatcacaagcccagcaacaccaaggtggacaagaaagttgagcccaaatcttgtgacaaaactcacacatgcccaccgtgcccagcacctgaactcctggggggaccgtcagtcttcctcttccccccaaaacccaaggacaccctcatgatctcccggacccctgaggtcacatgcgtggtggtggacgtgagccacgaagaccctgaggtcaagttcaactggtacgtggacggcgtggaggtgcataatgccaagacaaagccgcgggaggagcagtacaacagcacgtaccgtgtggtcagcgtcctcaccgtcctgcaccaggactggctgaatggcaaggagtacaagtgcaaggtctccaacaaagccctcccagcccccatcgagaaaaccatctccaaagccaaagggcagccccgagaaccacaggtgtacaccctgcccccatcccgggatgagctgaccaagaaccaggtcagcctgacctgcctggtcaaaggcttctatcccagcgacatcgccgtggagtgggagagcaatgggcagccggagaacaactacaagaccacgcctcccgtgctggactccgacggctccttcttcctctacagcaagctcaccgtggacaagagcaggtggcagcaggggaacgtcttctcatgctccgtgatgcatgaggctctgcacaaccactacacgcagaagagcctctccctgtctccgggtaaatga

SEQ ID NO: 82 - DNA, 5838 bp, Artificial Sequence
  Description of Artificial Sequence: Synthetic polynucleotide
tcgcgcgtttcggtgatgacggtgaaaacctctgacacatgcagctcccggagacggtcacagcttgtctgtaagcggatgccgggagcagacaagcccgtcagggcgcgtcagcgggtgttggcgggtgtcggggctggcttaactatgcggcatcagagcagattgtactgagagtgcaccatatgcggtgtgaaataccgcacagatgcgtaaggagaaaataccgcatcagattggctattggccattgcatacgttgtatccatatcataatatgtacatttatattggctcatgtccaacattaccgccatgttgacattgattattgactagttattaatagtaatcaattacggggtcattagttcatagcccatatatggagttccgcgttacataacttacggtaaatggcccgcctggctgaccgcccaacgacccccgcccattgacgtcaataatgacgtatgttcccatagtaacgccaatagggactttccattgacgtcaatgggtggagtatttacggtaaactgcccacttggcagtacatcaagtgtatcatatgccaagtacgccccctattgacgtcaatgacggtaaatggcccgcctggcattatgcccagtacatgaccttatgggactttcctacttggcagtacatctacgtattagtcatcgctattaccatggtgatgcggttttggcagtacatcaatgggcgtggatagcggtttgactcacggggatttccaagtctccaccccattgacgtcaatgggagtttgttttggcaccaaaatcaacgggactttccaaaatgtcgtaacaactccgccccattgacgcaaatgggcggtaggcgtgtacggtgggaggtctatataagcagagctcgtttagtgaaccgtcagatcgcctggagacgccatccacgctgttttgacctccatagaagacaccgggaccgatccagcctccatcggctcgcatctctccttcacgcgcccgccgccctacctgaggccgccatccacgccggttgagtcgcgttctgccgcctcccgcctgtggtgcctcctgaactgcgtccgccgtctaggtaagtttaaagctcaggtcgagaccgggcctttgtccggcgctcccttggagcctacctagactcagccggctctccacgctttgcctgaccctgcttgctcaactctagttaacggtggagggcagtgtagtctgagcagtactcgttgctgccgcgcgcgccaccagacataatagctgacagactaacagactgttcctttccatgggtcttttctgcagtcaccgtcctcgacacgtgtgatcagatatcgcggccgctctagaccaccatgggatggtcatgtatcatcctttttctagtagcaactgcaaccggtgtacattcccaggtccagctgagccagagcggaggccagatgaagaagccaggagatagtatgaggattagttgtcgagcaagcgggtatgagtttatcaactgcccaattaattggatacgcctggcaccaggaaagcgacctgagtggatgggatggatgaaaccacgagggggagccgtgaactacgctcgacagctgcagggaagagtcaccatgacaagggacatgtattctgagaccgctttcctggaactgaggtctctgacaagtgacgatactgcagtctacttttgcgcccggggcaagtattgtacagcaagagactactataactgggatttcgaacactggggacagggaactcccgtgaccgtcagctccccgtcgaccaagggcccatcggtcttccccctggcaccctcctccaagagcacctctgggggcacagcggccctgggctgcctggtcaaggactacttccccgaacccgtgacggtgtcgtggaactcaggcgccctgaccagcggcgtgcacaccttcccggctgtcctacagtcctcaggactctactccctcagcagcgtggtgaccgtgccctccagcagcttgggcacccagacctacatctgcaacgtgaatcacaagcccagcaacaccaaggtggacaagaaagttgagcccaaatcttgtgacaaaactcacacatgcccaccgtgcccagcacctgaactcctggggggaccgtcagtcttcctcttccccccaaaacccaaggacaccctcatgatctcccggacccctgaggtcacatgcgtggtggtggacgtgagccacgaagaccctgaggtcaagttcaactggtacgtggacggcgtggaggtgcataatgccaagacaaagccgcgggaggagcagtacaacagcacgtaccgtgtggtcagcgtcctcaccgtcctgcaccaggactggctgaatggcaaggagtacaagtgcaaggtctccaacaaagccctcccagcccccatcgagaaaaccatctccaaagccaaagggcagccccgagaaccacaggtgtacaccctgcccccatcccgggatgagctgaccaagaaccaggtcagcctgacctgcctggtcaaaggcttctatcccagcgacatcgccgtggagtgggagagcaatgggcagccggagaacaactacaagaccacgcctcccgtgctggactccgacggctccttcttcctctacagcaagctcaccgtggacaagagcaggtggcagcaggggaacgtcttctcatgctccgtgatgcatgaggctctgcacaaccactacacgcagaagagcctctccctgtctccgggtaaatgatgaggatccagatctgctgtgccttctagttgccagccatctgttgtttgcccctcccccgtgccttccttgaccctggaaggtgccactcccactgtcctttcctaataaaatgaggaaattgcatcgcattgtctgagtaggtgtcattctattctggggggtggggtggggcaggacagcaagggggaggattgggaagacaatagcaggcatgctggggatgcggtgggctctatgggtacccaggtgctgaagaattgacccggttcctcctgggccagaaagaagcaggcacatccccttctctgtgacacaccctgtccacgcccctggttcttagttccagccccactcataggacactcatagctcaggagggctccgccttcaatcccacccgctaaagtacttggagcggtctctccctccctcatcagcccaccaaaccaaacctagcctccaagagtgggaagaaattaaagcaagataggctattaagtgcagagggagagaaaatgcctccaacatgtgaggaagtaatgagagaaatcatagaattttaaggccatgatttaaggccatcatggccttaatcttccgcttcctcgctcactgactcgctgcgctcggtcgttcggctgcggcgagcggtatcagctcactcaaaggcggtaatacggttatccacagaatcaggggataacgcaggaaagaacatgtgagcaaaaggccagcaaaaggccaggaaccgtaaaaaggccgcgttgctggcgtttttccataggctccgcccccctgacgagcatcacaaaaatcgacgctcaagtcagaggtggcgaaacccgacaggactataaagataccaggcgtttccccctggaagctccctcgtgcgctctcctgttccgaccctgccgcttaccggatacctgtccgcctttctcccttcgggaagcgtggcgctttctcatagctcacgctgtaggtatctcagttcggtgtaggtcgttcgctccaagctgggctgtgtgcacgaaccccccgttcagcccgaccgctgcgccttatccggtaactatcgtcttgagtccaacccggtaagacacgacttatcgccactggcagcagccactggtaacaggattagcagagcgaggtatgtaggcggtgctacagagttcttgaagtggtggcctaactacggctacactagaagaacagtatttggtatctgcgctctgctgaagccagttaccttcggaaaaagagttggtagctcttgatccggcaaacaaaccaccgctggtagcggtggtttttttgtttgcaagcagcagattacgcgcagaaaaaaaggatctcaagaagatcctttgatcttttctacggggtctgacgctcagtggaacgaaaactcacgttaagggattttggtcatgagattatcaaaaaggatcttcacctagatccttttaaattaaaaatgaagttttaaatcaatctaaagtatatatgagtaaacttggtctgacagttaccaatgcttaatcagtgaggcacctatctcagcgatctgtctatttcgttcatccatagttgcctgactcggggggggggggcgctgaggtctgcctcgtgaagaaggtgttgctgactcataccaggcctgaatcgccccatcatccagccagaaagtgagggagccacggttgatgagagctttgttgtaggtggaccagttggtgattttgaacttttgctttgccacggaacggtctgcgttgtcgggaagatgcgtgatctgatccttcaactcagcaaaagttcgatttattcaacaaagccgccgtcccgtcaagtcagcgtaatgctctgccagtgttacaaccaattaaccaattctgattagaaaaactcatcgagcatcaaatgaaactgcaatttattcatatcaggattatcaataccatatttttgaaaaagccgtttctgtaatgaaggagaaaactcaccgaggcagttccataggatggcaagatcctggtatcggtctgcgattccgactcgtccaacatcaatacaacctattaatttcccctcgtcaaaaataaggttatcaagtgagaaatcaccatgagtgacgactgaatccggtgagaatggcaaaagcttatgcatttctttccagacttgttcaacaggccagccattacgctcgtcatcaaaatcactcgcatcaaccaaaccgttattcattcgtgattgcgcctgagcgagacgaaatacgcgatcgctgttaaaaggacaattacaaacaggaatcgaatgcaaccggcgcaggaacactgccagcgcatcaacaatattttcacctgaatcaggatattcttctaatacctggaatgctgttttcccggggatcgcagtggtgagtaaccatgcatcatcaggagtacggataaaatgcttgatggtcggaagaggcataaattccgtcagccagtttagtctgaccatctcatctgtaacatcattggcaacgctacctttgccatgtttcagaaacaactctggcgcatcgggcttcccatacaatcgatagattgtcgcacctgattgcccgacattatcgcgagcccatttatacccatataaatcagcatccatgttggaatttaatcgcggcctcgagcaagacgtttcccgttgaatatggctcataacaccccttgtattactgtttatgtaagcagacagttttattgttcatgatgatatatttttatcttgtgcaatgtaacatcagagattttgagacacaacgtggctttccccccccccccattattgaagcatttatcagggttattgtctcatgagcggatacatatttgaatgtatttagaaaaataaacaaataggggttccgcgcacatttccccgaaaagtgccacctgacgtctaagaaaccattattatcatgacattaacctataaaaataggcgtatcacgaggccctttcgtc

SEQ ID NO: 83 - DNA, 1425 bp, Artificial Sequence
  Description of Artificial Sequence: Synthetic polynucleotide
atgggatggtcatgtatcatcctttttctagtagcaactgcaaccggtgtacattcccaggtccagctgagccagagcggaggccagatgaagaagccaggagatagtatgaggattagttgtcgagcaagcgggtatgagtttatcaactgcccaattaattgggtgcgcctggcaccaggaaagcgacctgagtggatgggatggatgaaaccacgagggggagccgtgaactacgctcgacagctgcagggaagagtcaccatgacaagggacatgtattctgagaccgctttcctggaactgaggtctctgacaagtgacgatactgcagtctacttttgcacccggggcaagtattgtacagcaagagactactataactgggatttcgaacactggggacagggaactcccgtgaccgtcagctccccgtcgaccaagggcccatcggtcttccccctggcaccctcctccaagagcacctctgggggcacagcggccctgggctgcctggtcaaggactacttccccgaacccgtgacggtgtcgtggaactcaggcgccctgaccagcggcgtgcacaccttcccggctgtcctacagtcctcaggactctactccctcagcagcgtggtgaccgtgccctccagcagcttgggcacccagacctacatctgcaacgtgaatcacaagcccagcaacaccaaggtggacaagaaagttgagcccaaatcttgtgacaaaactcacacatgcccaccgtgcccagcacctgaactcctggggggaccgtcagtcttcctcttccccccaaaacccaaggacaccctcatgatctcccggacccctgaggtcacatgcgtggtggtggacgtgagccacgaagaccctgaggtcaagttcaactggtacgtggacggcgtggaggtgcataatgccaagacaaagccgcgggaggagcagtacaacagcacgtaccgtgtggtcagcgtcctcaccgtcctgcaccaggactggctgaatggcaaggagtacaagtgcaaggtctccaacaaagccctcccagcccccatcgagaaaaccatctccaaagccaaagggcagccccgagaaccacaggtgtacaccctgcccccatcccgggatgagctgaccaagaaccaggtcagcctgacctgcctggtcaaaggcttctatcccagcgacatcgccgtggagtgggagagcaatgggcagccggagaacaactacaagaccacgcctcccgtgctggactccgacggctccttcttcctctacagcaagctcaccgtggacaagagcaggtggcagcaggggaacgtcttctcatgctccgtgatgcatgaggctctgcacaaccactacacgcagaagagcctctccctgtctccgggtaaatga

SEQ ID NO: 84 - DNA, 5838 bp, Artificial Sequence
  Description of Artificial Sequence: Synthetic polynucleotide
tcgcgcgtttcggtgatgacggtgaaaacctctgacacatgcagctcccggagacggtcacagcttgtctgtaagcggatgccgggagcagacaagcccgtcagggcgcgtcagcgggtgttggcgggtgtcggggctggcttaactatgcggcatcagagcagattgtactgagagtgcaccatatgcggtgtgaaataccgcacagatgcgtaaggagaaaataccgcatcagattggctattggccattgcatacgttgtatccatatcataatatgtacatttatattggctcatgtccaacattaccgccatgttgacattgattattgactagttattaatagtaatcaattacggggtcattagttcatagcccatatatggagttccgcgttacataacttacggtaaatggcccgcctggctgaccgcccaacgacccccgcccattgacgtcaataatgacgtatgttcccatagtaacgccaatagggactttccattgacgtcaatgggtggagtatttacggtaaactgcccacttggcagtacatcaagtgtatcatatgccaagtacgccccctattgacgtcaatgacggtaaatggcccgcctggcattatgcccagtacatgaccttatgggactttcctacttggcagtacatctacgtattagtcatcgctattaccatggtgatgcggttttggcagtacatcaatgggcgtggatagcggtttgactcacggggatttccaagtctccaccccattgacgtcaatgggagtttgttttggcaccaaaatcaacgggactttccaaaatgtcgtaacaactccgccccattgacgcaaatgggcggtaggcgtgtacggtgggaggtctatataagcagagctcgtttagtgaaccgtcagatcgcctggagacgccatccacgctgttttgacctccatagaagacaccgggaccgatccagcctccatcggctcgcatctctccttcacgcgcccgccgccctacctgaggccgccatccacgccggttgagtcgcgttctgccgcctcccgcctgtggtgcctcctgaactgcgtccgccgtctaggtaagtttaaagctcaggtcgagaccgggcctttgtccggcgctcccttggagcctacctagactcagccggctctccacgctttgcctgaccctgcttgctcaactctagttaacggtggagggcagtgtagtctgagcagtactcgttgctgccgcgcgcgccaccagacataatagctgacagactaacagactgttcctttccatgggtcttttctgcagtcaccgtcctcgacacgtgtgatcagatatcgcggccgctctagaccaccatgggatggtcatgtatcatcctttttctagtagcaactgcaaccggtgtacattcccaggtccagctgagccagagcggaggccagatgaagaagccaggagatagtatgaggattagttgtcgagcaagcgggtatgagtttatcaactgcccaattaattgggtgcgcctggcaccaggaaagcgacctgagtggatgggatggatgaaaccacgagggggagccgtgaactacgctcgacagctgcagggaagagtcaccatgacaagggacatgtattctgagaccgctttcctggaactgaggtctctgacaagtgacgatactgcagtctacttttgcacccggggcaagtattgtacagcaagagactactataactgggatttcgaacactggggacagggaactcccgtgaccgtcagctccccgtcgaccaagggcccatcggtcttccccctggcaccctcctccaagagcacctctgggggcacagcggccctgggctgcctggtcaaggactacttccccgaacccgtgacggtgtcgtggaactcaggcgccctgaccagcggcgtgcacaccttcccggctgtcctacagtcctcaggactctactccctcagcagcgtggtgaccgtgccctccagcagcttgggcacccagacctacatctgcaacgtgaatcacaagcccagcaacaccaaggtggacaagaaagttgagcccaaatcttgtgacaaaactcacacatgcccaccgtgcccagcacctgaactcctggggggaccgtcagtcttcctcttccccccaaaacccaaggacaccctcatgatctcccggacccctgaggtcacatgcgtggtggtggacgtgagccacgaagaccctgaggtcaagttcaactggtacgtggacggcgtggaggtgcataatgccaagacaaagccgcgggaggagcagtacaacagcacgtaccgtgtggtcagcgtcctcaccgtcctgcaccaggactggctgaatggcaaggagtacaagtgcaaggtctccaacaaagccctcccagcccccatcgagaaaaccatctccaaagccaaagggcagccccgagaaccacaggtgtacaccctgcccccatcccgggatgagctgaccaagaaccaggtcagcctgacctgcctggtcaaaggcttctatcccagcgacatcgccgtggagtgggagagcaatgggcagccggagaacaactacaagaccacgcctcccgtgctggactccgacggctccttcttcctctacagcaagctcaccgtggacaagagcaggtggcagcaggggaacgtcttctcatgctccgtgatgcatgaggctctgcacaaccactacacgcagaagagcctctccctgtctccgggtaaatgatgaggatccagatctgctgtgccttctagttgccagccatctgttgtttgcccctcccccgtgccttccttgaccctggaaggtgccactcccactgtcctttcctaataaaatgaggaaattgcatcgcattgtctgagtaggtgtcattctattctggggggtggggtggggcaggacagcaagggggaggattgggaagacaatagcaggcatgctggggatgcggtgggctctatgggtacccaggtgctgaagaattgacccggttcctcctgggccagaaagaagcaggcacatccccttctctgtgacacaccctgtccacgcccctggttcttagttccagccccactcataggacactcatagctcaggagggctccgccttcaatcccacccgctaaagtacttggagcggtctctccctccctcatcagcccaccaaaccaaacctagcctccaagagtgggaagaaattaaagcaagataggctattaagtgcagagggagagaaaatgcctccaacatgtgaggaagtaatgagagaaatcatagaattttaaggccatgatttaaggccatcatggccttaatcttccgcttcctcgctcactgactcgctgcgctcggtcgttcggctgcggcgagcggtatcagctcactcaaaggcggtaatacggttatccacagaatcaggggataacgcaggaaagaacatgtgagcaaaaggccagcaaaaggccaggaaccgtaaaaaggccgcgttgctggcgtttttccataggctccgcccccctgacgagcatcacaaaaatcgacgctcaagtcagaggtggcgaaacccgacaggactataaagataccaggcgtttccccctggaagctccctcgtgcgctctcctgttccgaccctgccgcttaccggatacctgtccgcctttctcccttcgggaagcgtggcgctttctcatagctcacgctgtaggtatctcagttcggtgtaggtcgttcgctccaagctgggctgtgtgcacgaaccccccgttcagcccgaccgctgcgccttatccggtaactatcgtcttgagtccaacccggtaagacacgacttatcgccactggcagcagccactggtaacaggattagcagagcgaggtatgtaggcggtgctacagagttcttgaagtggtggcctaactacggctacactagaagaacagtatttggtatctgcgctctgctgaagccagttaccttcggaaaaagagttggtagctcttgatccggcaaacaaaccaccgctggtagcggtggtttttttgtttgcaagcagcagattacgcgcagaaaaaaaggatctcaagaagatcctttgatcttttctacggggtctgacgctcagtggaacgaaaactcacgttaagggattttggtcatgagattatcaaaaaggatcttcacctagatccttttaaattaaaaatgaagttttaaatcaatctaaagtatatatgagtaaacttggtctgacagttaccaatgcttaatcagtgaggcacctatctcagcgatctgtctatttcgttcatccatagttgcctgactcggggggggggggcgctgaggtctgcctcgtgaagaaggtgttgctgactcataccaggcctgaatcgccccatcatccagccagaaagtgagggagccacggttgatgagagctttgttgtaggtggaccagttggtgattttgaacttttgctttgccacggaacggtctgcgttgtcgggaagatgcgtgatctgatccttcaactcagcaaaagttcgatttattcaacaaagccgccgtcccgtcaagtcagcgtaatgctctgccagtgttacaaccaattaaccaattctgattagaaaaactcatcgagcatcaaatgaaactgcaatttattcatatcaggattatcaataccatatttttgaaaaagccgtttctgtaatgaaggagaaaactcaccgaggcagttccataggatggcaagatcctggtatcggtctgcgattccgactcgtccaacatcaatacaacctattaatttcccctcgtcaaaaataaggttatcaagtgagaaatcaccatgagtgacgactgaatccggtgagaatggcaaaagcttatgcatttctttccagacttgttcaacaggccagccattacgctcgtcatcaaaatcactcgcatcaaccaaaccgttattcattcgtgattgcgcctgagcgagacgaaatacgcgatcgctgttaaaaggacaattacaaacaggaatcgaatgcaaccggcgcaggaacactgccagcgcatcaacaatattttcacctgaatcaggatattcttctaatacctggaatgctgttttcccggggatcgcagtggtgagtaaccatgcatcatcaggagtacggataaaatgcttgatggtcggaagaggcataaattccgtcagccagtttagtctgaccatctcatctgtaacatcattggcaacgctacctttgccatgtttcagaaacaactctggcgcatcgggcttcccatacaatcgatagattgtcgcacctgattgcccgacattatcgcgagcccatttatacccatataaatcagcatccatgttggaatttaatcgcggcctcgagcaagacgtttcccgttgaatatggctcataacaccccttgtattactgtttatgtaagcagacagttttattgttcatgatgatatatttttatcttgtgcaatgtaacatcagagattttgagacacaacgtggctttccccccccccccattattgaagcatttatcagggttattgtctcatgagcggatacatatttgaatgtatttagaaaaataaacaaataggggttccgcgcacatttccccgaaaagtgccacctgacgtctaagaaaccattattatcatgacattaacctataaaaataggcgtatcacgaggccctttcgtc

SEQ ID NO: 85 - DNA, 1425 bp, Artificial Sequence
  Description of Artificial Sequence: Synthetic polynucleotide
atgggatggtcatgtatcatcctttttctagtagcaactgcaaccggtgtacattcccaggtccggctgagccagagcggaggccagatgaagaagccaggagatagtatgaggattagttgtcgagcaagcgggtatgagtttatcaactgcccaattaattggatacgcctggcaccaggaaagcgacctgagtggatgggatggatgaaaccacgagggggagccgtgaactacgctcgacagctgcagggaagagtcaccatgacaagggacatgtattctgagaccgctttcctggaactgaggtctctgacaagtgacgatactgcagtctacttttgcgcccggggcaagtattgtacagcaagagactactataactgggatttcgaacactggggacagggaactcccgtgaccgtcagctccccgtcgaccaagggcccatcggtcttccccctggcaccctcctccaagagcacctctgggggcacagcggccctgggctgcctggtcaaggactacttccccgaacccgtgacggtgtcgtggaactcaggcgccctgaccagcggcgtgcacaccttcccggctgtcctacagtcctcaggactctactccctcagcagcgtggtgaccgtgccctccagcagcttgggcacccagacctacatctgcaacgtgaatcacaagcccagcaacaccaaggtggacaagaaagttgagcccaaatcttgtgacaaaactcacacatgcccaccgtgcccagcacctgaactcctggggggaccgtcagtcttcctcttccccccaaaacccaaggacaccctcatgatctcccggacccctgaggtcacatgcgtggtggtggacgtgagccacgaagaccctgaggtcaagttcaactggtacgtggacggcgtggaggtgcataatgccaagacaaagccgcgggaggagcagtacaacagcacgtaccgtgtggtcagcgtcctcaccgtcctgcaccaggactggctgaatggcaaggagtacaagtgcaaggtctccaacaaagccctcccagcccccatcgagaaaaccatctccaaagccaaagggcagccccgagaaccacaggtgtacaccctgcccccatcccgggatgagctgaccaagaaccaggtcagcctgacctgcctggtcaaaggcttctatcccagcgacatcgccgtggagtgggagagcaatgggcagccggagaacaactacaagaccacgcctcccgtgctggactccgacggctccttcttcctctacagcaagctcaccgtggacaagagcaggtggcagcaggggaacgtcttctcatgctccgtgatgcatgaggctctgcacaaccactacacgcagaagagcctctccctgtctccgggtaaatga

SEQ ID NO: 86 - DNA, 5838 bp, Artificial Sequence
  Description of Artificial Sequence: Synthetic polynucleotide
tcgcgcgtttcggtgatgacggtgaaaacctctgacacatgcagctcccggagacggtcacagcttgtctgtaagcggatgccgggagcagacaagcccgtcagggcgcgtcagcgggtgttggcgggtgtcggggctggcttaactatgcggcatcagagcagattgtactgagagtgcaccatatgcggtgtgaaataccgcacagatgcgtaaggagaaaataccgcatcagattggctattggccattgcatacgttgtatccatatcataatatgtacatttatattggctcatgtccaacattaccgccatgttgacattgattattgactagttattaatagtaatcaattacggggtcattagttcatagcccatatatggagttccgcgttacataacttacggtaaatggcccgcctggctgaccgcccaacgacccccgcccattgacgtcaataatgacgtatgttcccatagtaacgccaatagggactttccattgacgtcaatgggtggagtatttacggtaaactgcccacttggcagtacatcaagtgtatcatatgccaagtacgccccctattgacgtcaatgacggtaaatggcccgcctggcattatgcccagtacatgaccttatgggactttcctacttggcagtacatctacgtattagtcatcgctattaccatggtgatgcggttttggcagtacatcaatgggcgtggatagcggtttgactcacggggatttccaagtctccaccccattgacgtcaatgggagtttgttttggcaccaaaatcaacgggactttccaaaatgtcgtaacaactccgccccattgacgcaaatgggcggtaggcgtgtacggtgggaggtctatataagcagagctcgtttagtgaaccgtcagatcgcctggagacgccatccacgctgttttgacctccatagaagacaccgggaccgatccagcctccatcggctcgcatctctccttcacgcgcccgccgccctacctgaggccgccatccacgccggttgagtcgcgttctgccgcctcccgcctgtggtgcctcctgaactgcgtccgccgtctaggtaagtttaaagctcaggtcgagaccgggcctttgtccggcgctcccttggagcctacctagactcagccggctctccacgctttgcctgaccctgcttgctcaactctagttaacggtggagggcagtgtagtctgagcagtactcgttgctgccgcgcgcgccaccagacataatagctgacagactaacagactgttcctttccatgggtcttttctgcagtcaccgtcctcgacacgtgtgatcagatatcgcggccgctctagaccaccatgggatggtcatgtatcatcctttttctagtagcaactgcaaccggtgtacattcccaggtccggctgagccagagcggaggccagatgaagaagccaggagatagtatgaggattagttgtcgagcaagcgggtatgagtttatcaactgcccaattaattggatacgcctggcaccaggaaagcgacctgagtggatgggatggatgaaaccacgagggggagccgtgaactacgctcgacagctgcagggaagagtcaccatgacaagggacatgtattctgagaccgctttcctggaactgaggtctctgacaagtgacgatactgcagtctacttttgcgcccggggcaagtattgtacagcaagagactactataactgggatttcgaacactggggacagggaactcccgtgaccgtcagctccccgtcgaccaagggcccatcggtcttccccctggcaccctcctccaagagcacctctgggggcacagcggccctgggctgcctggtcaaggactacttccccgaacccgtgacggtgtcgtggaactcaggcgccctgaccagcggcgtgcacaccttcccggctgtcctacagtcctcaggactctactccctcagcagcgtggtgaccgtgccctccagcagcttgggcacccagacctacatctgcaacgtgaatcacaagcccagcaacaccaaggtggacaagaaagttgagcccaaatcttgtgacaaaactcacacatgcccaccgtgcccagcacctgaactcctggggggaccgtcagtcttcctcttccccccaaaacccaaggacaccctcatgatctcccggacccctgaggtcacatgcgtggtggtggacgtgagccacgaagaccctgaggtcaagttcaactggtacgtggacggcgtggaggtgcataatgccaagacaaagccgcgggaggagcagtacaacagcacgtaccgtgtggtcagcgtcctcaccgtcctgcaccaggactggctgaatggcaaggagtacaagtgcaaggtctccaacaaagccctcccagcccccatcgagaaaaccatctccaaagccaaagggcagccccgagaaccacaggtgtacaccctgcccccatcccgggatgagctgaccaagaaccaggtcagcctgacctgcctggtcaaaggcttctatcccagcgacatcgccgtggagtgggagagcaatgggcagccggagaacaactacaagaccacgcctcccgtgctggactccgacggctccttcttcctctacagcaagctcaccgtggacaagagcaggtggcagcaggggaacgtcttctcatgctccgtgatgcatgaggctctgcacaaccactacacgcagaagagcctctccctgtctccgggtaaatgatgaggatccagatctgctgtgccttctagttgccagccatctgttgtttgcccctcccccgtgccttccttgaccctggaaggtgccactcccactgtcctttcctaataaaatgaggaaattgcatcgcattgtctgagtaggtgtcattctattctggggggtggggtggggcaggacagcaagggggaggattgggaagacaatagcaggcatgctggggatgcggtgggctctatgggtacccaggtgctgaagaattgacccggttcctcctgggccagaaagaagcaggcacatccccttctctgtgacacaccctgtccacgcccctggttcttagttccagccccactcataggacactcatagctcaggagggctccgccttcaatcccacccgctaaagtacttggagcggtctctccctccctcatcagcccaccaaaccaaacctagcctccaagagtgggaagaaattaaagcaagataggctattaagtgcagagggagagaaaatgcctccaacatgtgaggaagtaatgagagaaatcatagaattttaaggccatgatttaaggccatcatggccttaatcttccgcttcctcgctcactgactcgctgcgctcggtcgttcggctgcggcgagcggtatcagctcactcaaaggcggtaatacggttatccacagaatcaggggataacgcaggaaagaacatgtgagcaaaaggccagcaaaaggccaggaaccgtaaaaaggccgcgttgctggcgtttttccataggctccgcccccctgacgagcatcacaaaaatcgacgctcaagtcagaggtggcgaaacccgacaggactataaagataccaggcgtttccccctggaagctccctcgtgcgctctcctgttccgaccctgccgcttaccggatacctgtccgcctttctcccttcgggaagcgtggcgctttctcatagctcacgctgtaggtatctcagttcggtgtaggtcgttcgctccaagctgggctgtgtgcacgaaccccccgttcagcccgaccgctgcgccttatccggtaactatcgtcttgagtccaacccggtaagacacgacttatcgccactggcagcagccactggtaacaggattagcagagcgaggtatgtaggcggtgctacagagttcttgaagtggtggcctaactacggctacactagaagaacagtatttggtatctgcgctctgctgaagccagttaccttcggaaaaagagttggtagctcttgatccggcaaacaaaccaccgctggtagcggtggtttttttgtttgcaagcagcagattacgcgcagaaaaaaaggatctcaagaagatcctttgatcttttctacggggtctgacgctcagtggaacgaaaactcacgttaagggattttggtcatgagattatcaaaaaggatcttcacctagatccttttaaattaaaaatgaagttttaaatcaatctaaagtatatatgagtaaacttggtctgacagttaccaatgcttaatcagtgaggcacctatctcagcgatctgtctatttcgttcatccatagttgcctgactcggggggggggggcgctgaggtctgcctcgtgaagaaggtgttgctgactcataccaggcctgaatcgccccatcatccagccagaaagtgagggagccacggttgatgagagctttgttgtaggtggaccagttggtgattttgaacttttgctttgccacggaacggtctgcgttgtcgggaagatgcgtgatctgatccttcaactcagcaaaagttcgatttattcaacaaagccgccgtcccgtcaagtcagcgtaatgctctgccagtgttacaaccaattaaccaattctgattagaaaaactcatcgagcatcaaatgaaactgcaatttattcatatcaggattatcaataccatatttttgaaaaagccgtttctgtaatgaaggagaaaactcaccgaggcagttccataggatggcaagatcctggtatcggtctgcgattccgactcgtccaacatcaatacaacctattaatttcccctcgtcaaaaataaggttatcaagtgagaaatcaccatgagtgacgactgaatccggtgagaatggcaaaagcttatgcatttctttccagacttgttcaacaggccagccattacgctcgtcatcaaaatcactcgcatcaaccaaaccgttattcattcgtgattgcgcctgagcgagacgaaatacgcgatcgctgttaaaaggacaattacaaacaggaatcgaatgcaaccggcgcaggaacactgccagcgcatcaacaatattttcacctgaatcaggatattcttctaatacctggaatgctgttttcccggggatcgcagtggtgagtaaccatgcatcatcaggagtacggataaaatgcttgatggtcggaagaggcataaattccgtcagccagtttagtctgaccatctcatctgtaacatcattggcaacgctacctttgccatgtttcagaaacaactctggcgcatcgggcttcccatacaatcgatagattgtcgcacctgattgcccgacattatcgcgagcccatttatacccatataaatcagcatccatgttggaatttaatcgcggcctcgagcaagacgtttcccgttgaatatggctcataacaccccttgtattactgtttatgtaagcagacagttttattgttcatgatgatatatttttatcttgtgcaatgtaacatcagagattttgagacacaacgtggctttccccccccccccattattgaagcatttatcagggttattgtctcatgagcggatacatatttgaatgtatttagaaaaataaacaaataggggttccgcgcacatttccccgaaaagtgccacctgacgtctaagaaaccattattatcatgacattaacctataaaaataggcgtatcacgaggccctttcgtc

SEQ ID NO: 87 - DNA, 1425 bp, Artificial Sequence
  Description of Artificial Sequence: Synthetic polynucleotide
atgggatggtcatgtatcatcctttttctagtagcaactgcaaccggtgtacattcccaggtccggctgagccagagcggaggccagatgaagaagccaggagatagtatgaggattagttgtcgagcaagcgggtatgagtttatcaactgcccaattaattgggtgcgcctggcaccaggaaagcgacctgagtggatgggatggatgaaaccacgagggggagccgtgaactacgctcgacagctgcagggaagagtcaccatgacaagggacatgtattctgagaccgctttcctggaactgaggtctctgacaagtgacgatactgcagtctacttttgcacccggggcaagtattgtacagcaagagactactataactgggatttcgaacactggggacagggaactcccgtgaccgtcagctccccgtcgaccaagggcccatcggtcttccccctggcaccctcctccaagagcacctctgggggcacagcggccctgggctgcctggtcaaggactacttccccgaacccgtgacggtgtcgtggaactcaggcgccctgaccagcggcgtgcacaccttcccggctgtcctacagtcctcaggactctactccctcagcagcgtggtgaccgtgccctccagcagcttgggcacccagacctacatctgcaacgtgaatcacaagcccagcaacaccaaggtggacaagaaagttgagcccaaatcttgtgacaaaactcacacatgcccaccgtgcccagcacctgaactcctggggggaccgtcagtcttcctcttccccccaaaacccaaggacaccctcatgatctcccggacccctgaggtcacatgcgtggtggtggacgtgagccacgaagaccctgaggtcaagttcaactggtacgtggacggcgtggaggtgcataatgccaagacaaagccgcgggaggagcagtacaacagcacgtaccgtgtggtcagcgtcctcaccgtcctgcaccaggactggctgaatggcaaggagtacaagtgcaaggtctccaacaaagccctcccagcccccatcgagaaaaccatctccaaagccaaagggcagccccgagaaccacaggtgtacaccctgcccccatcccgggatgagctgaccaagaaccaggtcagcctgacctgcctggtcaaaggcttctatcccagcgacatcgccgtggagtgggagagcaatgggcagccggagaacaactacaagaccacgcctcccgtgctggactccgacggctccttcttcctctacagcaagctcaccgtggacaagagcaggtggcagcaggggaacgtcttctcatgctccgtgatgcatgaggctctgcacaaccactacacgcagaagagcctctccctgtctccgggtaaatga

SEQ ID NO: 88 - DNA, 5838 bp, Artificial Sequence
  Description of Artificial Sequence: Synthetic polynucleotide
tcgcgcgtttcggtgatgacggtgaaaacctctgacacatgcagctcccggagacggtcacagcttgtctgtaagcggatgccgggagcagacaagcccgtcagggcgcgtcagcgggtgttggcgggtgtcggggctggcttaactatgcggcatcagagcagattgtactgagagtgcaccatatgcggtgtgaaataccgcacagatgcgtaaggagaaaataccgcatcagattggctattggccattgcatacgttgtatccatatcataatatgtacatttatattggctcatgtccaacattaccgccatgttgacattgattattgactagttattaatagtaatcaattacggggtcattagttcatagcccatatatggagttccgcgttacataacttacggtaaatggcccgcctggctgaccgcccaacgacccccgcccattgacgtcaataatgacgtatgttcccatagtaacgccaatagggactttccattgacgtcaatgggtggagtatttacggtaaactgcccacttggcagtacatcaagtgtatcatatgccaagtacgccccctattgacgtcaatgacggtaaatggcccgcctggcattatgcccagtacatgaccttatgggactttcctacttggcagtacatctacgtattagtcatcgctattaccatggtgatgcggttttggcagtacatcaatgggcgtggatagcggtttgactcacggggatttccaagtctccaccccattgacgtcaatgggagtttgttttggcaccaaaatcaacgggactttccaaaatgtcgtaacaactccgccccattgacgcaaatgggcggtaggcgtgtacggtgggaggtctatataagcagagctcgtttagtgaaccgtcagatcgcctggagacgccatccacgctgttttgacctccatagaagacaccgggaccgatccagcctccatcggctcgcatctctccttcacgcgcccgccgccctacctgaggccgccatccacgccggttgagtcgcgttctgccgcctcccgcctgtggtgcctcctgaactgcgtccgccgtctaggtaagtttaaagctcaggtcgagaccgggcctttgtccggcgctcccttggagcctacctagactcagccggctctccacgctttgcctgaccctgcttgctcaactctagttaacggtggagggcagtgtagtctgagcagtactcgttgctgccgcgcgcgccaccagacataatagctgacagactaacagactgttcctttccatgggtcttttctgcagtcaccgtcctcgacacgtgtgatcagatatcgcggccgctctagaccaccatgggatggtcatgtatcatcctttttctagtagcaactgcaaccggtgtacattcccaggtccggctgagccagagcggaggccagatgaagaagccaggagatagtatgaggattagttgtcgagcaagcgggtatgagtttatcaactgcccaattaattgggtgcgcctggcaccaggaaagcgacctgagtggatgggatggatgaaaccacgagggggagccgtgaactacgctcgacagctgcagggaagagtcaccatgacaagggacatgtattctgagaccgctttcctggaactgaggtctctgacaagtgacgatactgcagtctacttttgcacccggggcaagtattgtacagcaagagactactataactgggatttcgaacactggggacagggaactcccgtgaccgtcagctccccgtcgaccaagggcccatcggtcttccccctggcaccctcctccaagagcacctctgggggcacagcggccctgggctgcctggtcaaggactacttccccgaacccgtgacggtgtcgtggaactcaggcgccctgaccagcggcgtgcacaccttcccggctgtcctacagtcctcaggactctactccctcagcagcgtggtgaccgtgccctccagcagcttgggcacccagacctacatctgcaacgtgaatcacaagcccagcaacaccaaggtggacaagaaagttgagcccaaatcttgtgacaaaactcacacatgcccaccgtgcccagcacctgaactcctggggggaccgtcagtcttcctcttccccccaaaacccaaggacaccctcatgatctcccggacccctgaggtcacatgcgtggtggtggacgtgagccacgaagaccctgaggtcaagttcaactggtacgtggacggcgtggaggtgcataatgccaagacaaagccgcgggaggagcagtacaacagcacgtaccgtgtggtcagcgtcctcaccgtcctgcaccaggactggctgaatggcaaggagtacaagtgcaaggtctccaacaaagccctcccagcccccatcgagaaaaccatctccaaagccaaagggcagccccgagaaccacaggtgtacaccctgcccccatcccgggatgagctgaccaagaaccaggtcagcctgacctgcctggtcaaaggcttctatcccagcgacatcgccgtggagtgggagagcaatgggcagccggagaacaactacaagaccacgcctcccgtgctggactccgacggctccttcttcctctacagcaagctcaccgtggacaagagcaggtggcagcaggggaacgtcttctcatgctccgtgatgcatgaggctctgcacaaccactacacgcagaagagcctctccctgtctccgggtaaatgatgaggatccagatctgctgtgccttctagttgccagccatctgttgtttgcccctcccccgtgccttccttgaccctggaaggtgccactcccactgtcctttcctaataaaatgaggaaattgcatcgcattgtctgagtaggtgtcattctattctggggggtggggtggggcaggacagcaagggggaggattgggaagacaatagcaggcatgctggggatgcggtgggctctatgggtacccaggtgctgaagaattgacccggttcctcctgggccagaaagaagcaggcacatccccttctctgtgacacaccctgtccacgcccctggttcttagttccagccccactcataggacactcatagctcaggagggctccgccttcaatcccacccgctaaagtacttggagcggtctctccctccctcatcagcccaccaaaccaaacctagcctccaagagtgggaagaaattaaagcaagataggctattaagtgcagagggagagaaaatgcctccaacatgtgaggaagtaatgagagaaatcatagaattttaaggccatgatttaaggccatcatggccttaatcttccgcttcctcgctcactgactcgctgcgctcggtcgttcggctgcggcgagcggtatcagctcactcaaaggcggtaatacggttatccacagaatcaggggataacgcaggaaagaacatgtgagcaaaaggccagcaaaaggccaggaaccgtaaaaaggccgcgttgctggcgtttttccataggctccgcccccctgacgagcatcacaaaaatcgacgctcaagtcagaggtggcgaaacccgacaggactataaagataccaggcgtttccccctggaagctccctcgtgcgctctcctgttccgaccctgccgcttaccggatacctgtccgcctttctcccttcgggaagcgtggcgctttctcatagctcacgctgtaggtatctcagttcggtgtaggtcgttcgctccaagctgggctgtgtgcacgaaccccccgttcagcccgaccgctgcgccttatccggtaactatcgtcttgagtccaacccggtaagacacgacttatcgccactggcagcagccactggtaacaggattagcagagcgaggtatgtaggcggtgctacagagttcttgaagtggtggcctaactacggctacactagaagaacagtatttggtatctgcgctctgctgaagccagttaccttcggaaaaagagttggtagctcttgatccggcaaacaaaccaccgctggtagcggtggtttttttgtttgcaagcagcagattacgcgcagaaaaaaaggatctcaagaagatcctttgatcttttctacggggtctgacgctcagtggaacgaaaactcacgttaagggattttggtcatgagattatcaaaaaggatcttcacctagatccttttaaattaaaaatgaagttttaaatcaatctaaagtatatatgagtaaacttggtctgacagttaccaatgcttaatcagtgaggcacctatctcagcgatctgtctatttcgttcatccatagttgcctgactcggggggggggggcgctgaggtctgcctcgtgaagaaggtgttgctgactcataccaggcctgaatcgccccatcatccagccagaaagtgagggagccacggttgatgagagctttgttgtaggtggaccagttggtgattttgaacttttgctttgccacggaacggtctgcgttgtcgggaagatgcgtgatctgatccttcaactcagcaaaagttcgatttattcaacaaagccgccgtcccgtcaagtcagcgtaatgctctgccagtgttacaaccaattaaccaattctgattagaaaaactcatcgagcatcaaatgaaactgcaatttattcatatcaggattatcaataccatatttttgaaaaagccgtttctgtaatgaaggagaaaactcaccgaggcagttccataggatggcaagatcctggtatcggtctgcgattccgactcgtccaacatcaatacaacctattaatttcccctcgtcaaaaataaggttatcaagtgagaaatcaccatgagtgacgactgaatccggtgagaatggcaaaagcttatgcatttctttccagacttgttcaacaggccagccattacgctcgtcatcaaaatcactcgcatcaaccaaaccgttattcattcgtgattgcgcctgagcgagacgaaatacgcgatcgctgttaaaaggacaattacaaacaggaatcgaatgcaaccggcgcaggaacactgccagcgcatcaacaatattttcacctgaatcaggatattcttctaatacctggaatgctgttttcccggggatcgcagtggtgagtaaccatgcatcatcaggagtacggataaaatgcttgatggtcggaagaggcataaattccgtcagccagtttagtctgaccatctcatctgtaacatcattggcaacgctacctttgccatgtttcagaaacaactctggcgcatcgggcttcccatacaatcgatagattgtcgcacctgattgcccgacattatcgcgagcccatttatacccatataaatcagcatccatgttggaatttaatcgcggcctcgagcaagacgtttcccgttgaatatggctcataacaccccttgtattactgtttatgtaagcagacagttttattgttcatgatgatatatttttatcttgtgcaatgtaacatcagagattttgagacacaacgtggctttccccccccccccattattgaagcatttatcagggttattgtctcatgagcggatacatatttgaatgtatttagaaaaataaacaaataggggttccgcgcacatttccccgaaaagtgccacctgacgtctaagaaaccattattatcatgacattaacctataaaaataggcgtatcacgaggccctttcgtc

SEQ ID NO: 89 - DNA, 1425 bp, Artificial Sequence
  Description of Artificial Sequence: Synthetic polynucleotide
atgggatggtcatgtatcatcctttttctagtagcaactgcaaccggtgtacattcccaggtccagctgagccagagcggaggccagatgaagaagccaggagatagtatgaggattagttgtcgagcaagcgggtatgagtttatcaactgcccaattaattggatacgcctggcaccaggaaagcgacctgagtggatgggatggatgaaaccacgagggggagccgtgaactacgctcgacagctgcagggaagagtcaccatgacaagggacatgtattctgagaccgctttcctggaactgaggtctctgacaagtgacgatactgcagtctacttttgcacccggggcaagtattgtacagcaagagactactataactgggatttcgaacactggggacagggaactcccgtgaccgtcagctccccgtcgaccaagggcccatcggtcttccccctggcaccctcctccaagagcacctctgggggcacagcggccctgggctgcctggtcaaggactacttccccgaacccgtgacggtgtcgtggaactcaggcgccctgaccagcggcgtgcacaccttcccggctgtcctacagtcctcaggactctactccctcagcagcgtggtgaccgtgccctccagcagcttgggcacccagacctacatctgcaacgtgaatcacaagcccagcaacaccaaggtggacaagaaagttgagcccaaatcttgtgacaaaactcacacatgcccaccgtgcccagcacctgaactcctggggggaccgtcagtcttcctcttccccccaaaacccaaggacaccctcatgatctcccggacccctgaggtcacatgcgtggtggtggacgtgagccacgaagaccctgaggtcaagttcaactggtacgtggacggcgtggaggtgcataatgccaagacaaagccgcgggaggagcagtacaacagcacgtaccgtgtggtcagcgtcctcaccgtcctgcaccaggactggctgaatggcaaggagtacaagtgcaaggtctccaacaaagccctcccagcccccatcgagaaaaccatctccaaagccaaagggcagccccgagaaccacaggtgtacaccctgcccccatcccgggatgagctgaccaagaaccaggtcagcctgacctgcctggtcaaaggcttctatcccagcgacatcgccgtggagtgggagagcaatgggcagccggagaacaactacaagaccacgcctcccgtgctggactccgacggctccttcttcctctacagcaagctcaccgtggacaagagcaggtggcagcaggggaacgtcttctcatgctccgtgatgcatgaggctctgcacaaccactacacgcagaagagcctctccctgtctccgggtaaatga

SEQ ID NO: 90 - DNA, 5838 bp, Artificial Sequence
  Description of Artificial Sequence: Synthetic polynucleotide
tcgcgcgtttcggtgatgacggtgaaaacctctgacacatgcagctcccggagacggtcacagcttgtctgtaagcggatgccgggagcagacaagcccgtcagggcgcgtcagcgggtgttggcgggtgtcggggctggcttaactatgcggcatcagagcagattgtactgagagtgcaccatatgcggtgtgaaataccgcacagatgcgtaaggagaaaataccgcatcagattggctattggccattgcatacgttgtatccatatcataatatgtacatttatattggctcatgtccaacattaccgccatgttgacattgattattgactagttattaatagtaatcaattacggggtcattagttcatagcccatatatggagttccgcgttacataacttacggtaaatggcccgcctggctgaccgcccaacgacccccgcccattgacgtcaataatgacgtatgttcccatagtaacgccaatagggactttccattgacgtcaatgggtggagtatttacggtaaactgcccacttggcagtacatcaagtgtatcatatgccaagtacgccccctattgacgtcaatgacggtaaatggcccgcctggcattatgcccagtacatgaccttatgggactttcctacttggcagtacatctacgtattagtcatcgctattaccatggtgatgcggttttggcagtacatcaatgggcgtggatagcggtttgactcacggggatttccaagtctccaccccattgacgtcaatgggagtttgttttggcaccaaaatcaacgggactttccaaaatgtcgtaacaactccgccccattgacgcaaatgggcggtaggcgtgtacggtgggaggtctatataagcagagctcgtttagtgaaccgtcagatcgcctggagacgccatccacgctgttttgacctccatagaagacaccgggaccgatccagcctccatcggctcgcatctctccttcacgcgcccgccgccctacctgaggccgccatccacgccggttgagtcgcgttctgccgcctcccgcctgtggtgcctcctgaactgcgtccgccgtctaggtaagtttaaagctcaggtcgagaccgggcctttgtccggcgctcccttggagcctacctagactcagccggctctccacgctttgcctgaccctgcttgctcaactctagttaacggtggagggcagtgtagtctgagcagtactcgttgctgccgcgcgcgccaccagacataatagctgacagactaacagactgttcctttccatgggtcttttctgcagtcaccgtcctcgacacgtgtgatcagatatcgcggccgctctagaccaccatgggatggtcatgtatcatcctttttctagtagcaactgcaaccggtgtacattcccaggtccagctgagccagagcggaggccagatgaagaagccaggagatagtatgaggattagttgtcgagcaagcgggtatgagtttatcaactgcccaattaattggatacgcctggcaccaggaaagcgacctgagtggatgggatggatgaaaccacgagggggagccgtgaactacgctcgacagctgcagggaagagtcaccatgacaagggacatgtattctgagaccgctttcctggaactgaggtctctgacaagtgacgatactgcagtctacttttgcacccggggcaagtattgtacagcaagagactactataactgggatttcgaacactggggacagggaactcccgtgaccgtcagctccccgtcgaccaagggcccatcggtcttccccctggcaccctcctccaagagcacctctgggggcacagcggccctgggctgcctggtcaaggactacttccccgaacccgtgacggtgtcgtggaactcaggcgccctgaccagcggcgtgcacaccttcccggctgtcctacagtcctcaggactctactccctcagcagcgtggtgaccgtgccctccagcagcttgggcacccagacctacatctgcaacgtgaatcacaagcccagcaacaccaaggtggacaagaaagttgagcccaaatcttgtgacaaaactcacacatgcccaccgtgcccagcacctgaactcctggggggaccgtcagtcttcctcttccccccaaaacccaaggacaccctcatgatctcccggacccctgaggtcacatgcgtggtggtggacgtgagccacgaagaccctgaggtcaagttcaactggtacgtggacggcgtggaggtgcataatgccaagacaaagccgcgggaggagcagtacaacagcacgtaccgtgtggtcagcgtcctcaccgtcctgcaccaggactggctgaatggcaaggagtacaagtgcaaggtctccaacaaagccctcccagcccccatcgagaaaaccatctccaaagccaaagggcagccccgagaaccacaggtgtacaccctgcccccatcccgggatgagctgaccaagaaccaggtcagcctgacctgcctggtcaaaggcttctatcccagcgacatcgccgtggagtgggagagcaatgggcagccggagaacaactacaagaccacgcctcccgtgctggactccgacggctccttcttcctctacagcaagctcaccgtggacaagagcaggtggcagcaggggaacgtcttctcatgctccgtgatgcatgaggctctgcacaaccactacacgcagaagagcctctccctgtctccgggtaaatgatgaggatccagatctgctgtgccttctagttgccagccatctgttgtttgcccctcccccgtgccttccttgaccctggaaggtgccactcccactgtcctttcctaataaaatgaggaaattgcatcgcattgtctgagtaggtgtcattctattctggggggtggggtggggcaggacagcaagggggaggattgggaagacaatagcaggcatgctggggatgcggtgggctctatgggtacccaggtgctgaagaattgacccggttcctcctgggccagaaagaagcaggcacatccccttctctgtgacacaccctgtccacgcccctggttcttagttccagccccactcataggacactcatagctcaggagggctccgccttcaatcccacccgctaaagtacttggagcggtctctccctccctcatcagcccaccaaaccaaacctagcctccaagagtgggaagaaattaaagcaagataggctattaagtgcagagggagagaaaatgcctccaacatgtgaggaagtaatgagagaaatcatagaattttaaggccatgatttaaggccatcatggccttaatcttccgcttcctcgctcactgactcgctgcgctcggtcgttcggctgcggcgagcggtatcagctcactcaaaggcggtaatacggttatccacagaatcaggggataacgcaggaaagaacatgtgagcaaaaggccagcaaaaggccaggaaccgtaaaaaggccgcgttgctggcgtttttccataggctccgcccccctgacgagcatcacaaaaatcgacgctcaagtcagaggtggcgaaacccgacaggactataaagataccaggcgtttccccctggaagctccctcgtgcgctctcctgttccgaccctgccgcttaccggatacctgtccgcctttctcccttcgggaagcgtggcgctttctcatagctcacgctgtaggtatctcagttcggtgtaggtcgttcgctccaagctgggctgtgtgcacgaaccccccgttcagcccgaccgctgcgccttatccggtaactatcgtcttgagtccaacccggtaagacacgacttatcgccactggcagcagccactggtaacaggattagcagagcgaggtatgtaggcggtgctacagagttcttgaagtggtggcctaactacggctacactagaagaacagtatttggtatctgcgctctgctgaagccagttaccttcggaaaaagagttggtagctcttgatccggcaaacaaaccaccgctggtagcggtggtttttttgtttgcaagcagcagattacgcgcagaaaaaaaggatctcaagaagatcctttgatcttttctacggggtctgacgctcagtggaacgaaaactcacgttaagggattttggtcatgagattatcaaaaaggatcttcacctagatccttttaaattaaaaatgaagttttaaatcaatctaaagtatatatgagtaaacttggtctgacagttaccaatgcttaatcagtgaggcacctatctcagcgatctgtctatttcgttcatccatagttgcctgactcggggggggggggcgctgaggtctgcctcgtgaagaaggtgttgctgactcataccaggcctgaatcgccccatcatccagccagaaagtgagggagccacggttgatgagagctttgttgtaggtggaccagttggtgattttgaacttttgctttgccacggaacggtctgcgttgtcgggaagatgcgtgatctgatccttcaactcagcaaaagttcgatttattcaacaaagccgccgtcccgtcaagtcagcgtaatgctctgccagtgttacaaccaattaaccaattctgattagaaaaactcatcgagcatcaaatgaaactgcaatttattcatatcaggattatcaataccatatttttgaaaaagccgtttctgtaatgaaggagaaaactcaccgaggcagttccataggatggcaagatcctggtatcggtctgcgattccgactcgtccaacatcaatacaacctattaatttcccctcgtcaaaaataaggttatcaagtgagaaatcaccatgagtgacgactgaatccggtgagaatggcaaaagcttatgcatttctttccagacttgttcaacaggccagccattacgctcgtcatcaaaatcactcgcatcaaccaaaccgttattcattcgtgattgcgcctgagcgagacgaaatacgcgatcgctgttaaaaggacaattacaaacaggaatcgaatgcaaccggcgcaggaacactgccagcgcatcaacaatattttcacctgaatcaggatattcttctaatacctggaatgctgttttcccggggatcgcagtggtgagtaaccatgcatcatcaggagtacggataaaatgcttgatggtcggaagaggcataaattccgtcagccagtttagtctgaccatctcatctgtaacatcattggcaacgctacctttgccatgtttcagaaacaactctggcgcatcgggcttcccatacaatcgatagattgtcgcacctgattgcccgacattatcgcgagcccatttatacccatataaatcagcatccatgttggaatttaatcgcggcctcgagcaagacgtttcccgttgaatatggctcataacaccccttgtattactgtttatgtaagcagacagttttattgttcatgatgatatatttttatcttgtgcaatgtaacatcagagattttgagacacaacgtggctttccccccccccccattattgaagcatttatcagggttattgtctcatgagcggatacatatttgaatgtatttagaaaaataaacaaataggggttccgcgcacatttccccgaaaagtgccacctgacgtctaagaaaccattattatcatgacattaacctataaaaataggcgtatcacgaggccctttcgtc

SEQ ID NO: 91 - DNA, 1425 bp, Artificial Sequence
  Description of Artificial Sequence: Synthetic polynucleotide
atgggatggtcatgtatcatcctttttctagtagcaactgcaaccggtgtacattcccaggtgcgactgtcgcagtctggaggtcagatgaagaagcctggcgactcgatgagaatttcttgtcgggcttcgggatacgaatttcgtaattgtccaataaattggattcggctggcccccggaaaaaggcctgagtggatgggatggatgaagcctaggtggggggccgtcagttacgcacgtcaacttcagggcagagtgaccatgactcgagacatgtattccgagacagcctttttggagctccgttccttgacatccgacgacacggccgtctatttttgtactcggggaaaatattgcactgcgcgcgactattataattgggacttcgaacactggggccagggcaccccggtcaccgtctcgtcagcgtcgaccaagggcccatcggtcttccccctggcaccctcctccaagagcacctctgggggcacagcggccctgggctgcctggtcaaggactacttccccgaaccggtgacggtgtcgtggaactcaggcgccctgaccagcggcgtgcacaccttcccggctgtcctacagtcctcaggactctactccctcagcagcgtggtgaccgtgccctccagcagcttgggcacccagacctacatctgcaacgtgaatcacaagcccagcaacaccaaggtggacaagaaagttgagcccaaatcttgtgacaaaactcacacatgcccaccgtgcccagcacctgaactcctggggggaccgtcagtcttcctcttccccccaaaacccaaggacaccctcatgatctcccggacccctgaggtcacatgcgtggtggtggacgtgagccacgaagaccctgaggtcaagttcaactggtacgtggacggcgtggaggtgcataatgccaagacaaagccgcgggaggagcagtacaacagcacgtaccgtgtggtcagcgtcctcaccgtcctgcaccaggactggctgaatggcaaggagtacaagtgcaaggtctccaacaaagccctcccagcccccatcgagaaaaccatctccaaagccaaagggcagccccgagaaccacaggtgtacaccctgcccccatcccgggatgagctgaccaagaaccaggtcagcctgacctgcctggtcaaaggcttctatcccagcgacatcgccgtggagtgggagagcaatgggcagccggagaacaactacaagaccacgcctcccgtgctggactccgacggctccttcttcctctacagcaagctcaccgtggacaagagcaggtggcagcaggggaacgtcttctcatgctccgtgatgcatgaggctctgcacaaccactacacgcagaagagcctctccctgtctccgggtaaatga

SEQ ID NO: 92 - DNA, 5838 bp, Artificial Sequence
  Description of Artificial Sequence: Synthetic polynucleotide
tcgcgcgtttcggtgatgacggtgaaaacctctgacacatgcagctcccggagacggtcacagcttgtctgtaagcggatgccgggagcagacaagcccgtcagggcgcgtcagcgggtgttggcgggtgtcggggctggcttaactatgcggcatcagagcagattgtactgagagtgcaccatatgcggtgtgaaataccgcacagatgcgtaaggagaaaataccgcatcagattggctattggccattgcatacgttgtatccatatcataatatgtacatttatattggctcatgtccaacattaccgccatgttgacattgattattgactagttattaatagtaatcaattacggggtcattagttcatagcccatatatggagttccgcgttacataacttacggtaaatggcccgcctggctgaccgcccaacgacccccgcccattgacgtcaataatgacgtatgttcccatagtaacgccaatagggactttccattgacgtcaatgggtggagtatttacggtaaactgcccacttggcagtacatcaagtgtatcatatgccaagtacgccccctattgacgtcaatgacggtaaatggcccgcctggcattatgcccagtacatgaccttatgggactttcctacttggcagtacatctacgtattagtcatcgctattaccatggtgatgcggttttggcagtacatcaatgggcgtggatagcggtttgactcacggggatttccaagtctccaccccattgacgtcaatgggagtttgttttggcaccaaaatcaacgggactttccaaaatgtcgtaacaactccgccccattgacgcaaatgggcggtaggcgtgtacggtgggaggtctatataagcagagctcgtttagtgaaccgtcagatcgcctggagacgccatccacgctgttttgacctccatagaagacaccgggaccgatccagcctccatcggctcgcatctctccttcacgcgcccgccgccctacctgaggccgccatccacgccggttgagtcgcgttctgccgcctcccgcctgtggtgcctcctgaactgcgtccgccgtctaggtaagtttaaagctcaggtcgagaccgggcctttgtccggcgctcccttggagcctacctagactcagccggctctccacgctttgcctgaccctgcttgctcaactctagttaacggtggagggcagtgtagtctgagcagtactcgttgctgccgcgcgcgccaccagacataatagctgacagactaacagactgttcctttccatgggtcttttctgcagtcaccgtcgtcgacacgtgtgatcagatatcgcggccgctctagaccaccatgggatggtcatgtatcatcctttttctagtagcaactgcaaccggtgtacattcccaggtgcgactgtcgcagtctggaggtcagatgaagaagcctggcgactcgatgagaatttcttgtcgggcttcgggatacgaatttcgtaattgtccaataaattggattcggctggcccccggaaaaaggcctgagtggatgggatggatgaagcctaggtggggggccgtcagttacgcacgtcaacttcagggcagagtgaccatgactcgagacatgtattccgagacagcctttttggagctccgttccttgacatccgacgacacggccgtctatttttgtactcggggaaaatattgcactgcgcgcgactattataattgggacttcgaacactggggccagggcaccccggtcaccgtctcgtcagcgtcgaccaagggcccatcggtcttccccctggcaccctcctccaagagcacctctgggggcacagcggccctgggctgcctggtcaaggactacttccccgaaccggtgacggtgtcgtggaactcaggcgccctgaccagcggcgtgcacaccttcccggctgtcctacagtcctcaggactctactccctcagcagcgtggtgaccgtgccctccagcagcttgggcacccagacctacatctgcaacgtgaatcacaagcccagcaacaccaaggtggacaagaaagttgagcccaaatcttgtgacaaaactcacacatgcccaccgtgcccagcacctgaactcctggggggaccgtcagtcttcctcttccccccaaaacccaaggacaccctcatgatctcccggacccctgaggtcacatgcgtggtggtggacgtgagccacgaagaccctgaggtcaagttcaactggtacgtggacggcgtggaggtgcataatgccaagacaaagccgcgggaggagcagtacaacagcacgtaccgtgtggtcagcgtcctcaccgtcctgcaccaggactggctgaatggcaaggagtacaagtgcaaggtctccaacaaagccctcccagcccccatcgagaaaaccatctccaaagccaaagggcagccccgagaaccacaggtgtacaccctgcccccatcccgggatgagctgaccaagaaccaggtcagcctgacctgcctggtcaaaggcttctatcccagcgacatcgccgtggagtgggagagcaatgggcagccggagaacaactacaagaccacgcctcccgtgctggactccgacggctccttcttcctctacagcaagctcaccgtggacaagagcaggtggcagcaggggaacgtcttctcatgctccgtgatgcatgaggctctgcacaaccactacacgcagaagagcctctccctgtctccgggtaaatgatgaggatccagatctgctgtgccttctagttgccagccatctgttgtttgcccctcccccgtgccttccttgaccctggaaggtgccactcccactgtcctttcctaataaaatgaggaaattgcatcgcattgtctgagtaggtgtcattctattctggggggtggggtggggcaggacagcaagggggaggattgggaagacaatagcaggcatgctggggatgcggtgggctctatgggtacccaggtgctgaagaattgacccggttcctcctgggccagaaagaagcaggcacatccccttctctgtgacacaccctgtccacgcccctggttcttagttccagccccactcataggacactcatagctcaggagggctccgccttcaatcccacccgctaaagtacttggagcggtctctccctccctcatcagcccaccaaaccaaacctagcctccaagagtgggaagaaattaaagcaagataggctattaagtgcagagggagagaaaatgcctccaacatgtgaggaagtaatgagagaaatcatagaattttaaggccatgatttaaggccatcatggccttaatcttccgcttcctcgctcactgactcgctgcgctcggtcgttcggctgcggcgagcggtatcagctcactcaaaggcggtaatacggttatccacagaatcaggggataacgcaggaaagaacatgtgagcaaaaggccagcaaaaggccaggaaccgtaaaaaggccgcgttgctggcgtttttccataggctccgcccccctgacgagcatcacaaaaatcgacgctcaagtcagaggtggcgaaacccgacaggactataaagataccaggcgtttccccctggaagctccctcgtgcgctctcctgttccgaccctgccgcttaccggatacctgtccgcctttctcccttcgggaagcgtggcgctttctcatagctcacgctgtaggtatctcagttcggtgtaggtcgttcgctccaagctgggctgtgtgcacgaaccccccgttcagcccgaccgctgcgccttatccggtaactatcgtcttgagtccaacccggtaagacacgacttatcgccactggcagcagccactggtaacaggattagcagagcgaggtatgtaggcggtgctacagagttcttgaagtggtggcctaactacggctacactagaagaacagtatttggtatctgcgctctgctgaagccagttaccttcggaaaaagagttggtagctcttgatccggcaaacaaaccaccgctggtagcggtggtttttttgtttgcaagcagcagattacgcgcagaaaaaaaggatctcaagaagatcctttgatcttttctacggggtctgacgctcagtggaacgaaaactcacgttaagggattttggtcatgagattatcaaaaaggatcttcacctagatccttttaaattaaaaatgaagttttaaatcaatctaaagtatatatgagtaaacttggtctgacagttaccaatgcttaatcagtgaggcacctatctcagcgatctgtctatttcgttcatccatagttgcctgactcggggggggggggcgctgaggtctgcctcgtgaagaaggtgttgctgactcataccaggcctgaatcgccccatcatccagccagaaagtgagggagccacggttgatgagagctttgttgtaggtggaccagttggtgattttgaacttttgctttgccacggaacggtctgcgttgtcgggaagatgcgtgatctgatccttcaactcagcaaaagttcgatttattcaacaaagccgccgtcccgtcaagtcagcgtaatgctctgccagtgttacaaccaattaaccaattctgattagaaaaactcatcgagcatcaaatgaaactgcaatttattcatatcaggattatcaataccatatttttgaaaaagccgtttctgtaatgaaggagaaaactcaccgaggcagttccataggatggcaagatcctggtatcggtctgcgattccgactcgtccaacatcaatacaacctattaatttcccctcgtcaaaaataaggttatcaagtgagaaatcaccatgagtgacgactgaatccggtgagaatggcaaaagcttatgcatttctttccagacttgttcaacaggccagccattacgctcgtcatcaaaatcactcgcatcaaccaaaccgttattcattcgtgattgcgcctgagcgagacgaaatacgcgatcgctgttaaaaggacaattacaaacaggaatcgaatgcaaccggcgcaggaacactgccagcgcatcaacaatattttcacctgaatcaggatattcttctaatacctggaatgctgttttcccggggatcgcagtggtgagtaaccatgcatcatcaggagtacggataaaatgcttgatggtcggaagaggcataaattccgtcagccagtttagtctgaccatctcatctgtaacatcattggcaacgctacctttgccatgtttcagaaacaactctggcgcatcgggcttcccatacaatcgatagattgtcgcacctgattgcccgacattatcgcgagcccatttatacccatataaatcagcatccatgttggaatttaatcgcggcctcgagcaagacgtttcccgttgaatatggctcataacaccccttgtattactgtttatgtaagcagacagttttattgttcatgatgatatatttttatcttgtgcaatgtaacatcagagattttgagacacaacgtggctttccccccccccccattattgaagcatttatcagggttattgtctcatgagcggatacatatttgaatgtatttagaaaaataaacaaataggggttccgcgcacatttccccgaaaagtgccacctgacgtctaagaaaccattattatcatgacattaacctataaaaataggcgtatcacgaggccctttcgtc

SEQ ID NO: 93 - DNA, 1425 bp, Artificial Sequence
  Description of Artificial Sequence: Synthetic polynucleotide
atgggatggtcatgtatcatcctttttctagtagcaactgcaaccggtgtacattcccaggtgcagctggtgcagtctggaggtcagatgaagaagcctggcgagtcgatgagaatttcttgtcgggcttctggatatgaatttattgattgtccgattaattggattcgtctggcccccggaaaaaggcctgagtggatgggatggctgaagcctcggtggggggccgtcaactacgcacgtccacttcagggcagagtgaccatgactcgagacgtttattccgacacagcctttttggagctgcgctcgttgacagtagacgacacggccgtctacttttgtactaggggaaaatactgtaccgcgcgtgactattacaattgggacttcgaacactggggccggggcaccccggtcaccgtctcatcaccgtcgaccaagggcccatcggtcttccccctggcaccctcctccaagagcacctctgggggcacagcggccctgggctgcctggtcaaggactacttccccgaaccggtgacggtgtcgtggaactcaggcgccctgaccagcggcgtgcacaccttcccggctgtcctacagtcctcaggactctactccctcagcagcgtggtgaccgtgccctccagcagcttgggcacccagacctacatctgcaacgtgaatcacaagcccagcaacaccaaggtggacaagaaagttgagcccaaatcttgtgacaaaactcacacatgcccaccgtgcccagcacctgaactcctggggggaccgtcagtcttcctcttccccccaaaacccaaggacaccctcatgatctcccggacccctgaggtcacatgcgtggtggtggacgtgagccacgaagaccctgaggtcaagttcaactggtacgtggacggcgtggaggtgcataatgccaagacaaagccgcgggaggagcagtacaacagcacgtaccgtgtggtcagcgtcctcaccgtcctgcaccaggactggctgaatggcaaggagtacaagtgcaaggtctccaacaaagccctcccagcccccatcgagaaaaccatctccaaagccaaagggcagccccgagaaccacaggtgtacaccctgcccccatcccgggatgagctgaccaagaaccaggtcagcctgacctgcctggtcaaaggcttctatcccagcgacatcgccgtggagtgggagagcaatgggcagccggagaacaactacaagaccacgcctcccgtgctggactccgacggctccttcttcctctacagcaagctcaccgtggacaagagcaggtggcagcaggggaacgtcttctcatgctccgtgatgcatgaggctctgcacaaccactacacgcagaagagcctctccctgtctccgggtaaatga

SEQ ID NO: 94 - DNA, 5838 bp, Artificial Sequence
  Description of Artificial Sequence: Synthetic polynucleotide
tcgcgcgtttcggtgatgacggtgaaaacctctgacacatgcagctcccggagacggtcacagcttgtctgtaagcggatgccgggagcagacaagcccgtcagggcgcgtcagcgggtgttggcgggtgtcggggctggcttaactatgcggcatcagagcagattgtactgagagtgcaccatatgcggtgtgaaataccgcacagatgcgtaaggagaaaataccgcatcagattggctattggccattgcatacgttgtatccatatcataatatgtacatttatattggctcatgtccaacattaccgccatgttgacattgattattgactagttattaatagtaatcaattacggggtcattagttcatagcccatatatggagttccgcgttacataacttacggtaaatggcccgcctggctgaccgcccaacgacccccgcccattgacgtcaataatgacgtatgttcccatagtaacgccaatagggactttccattgacgtcaatgggtggagtatttacggtaaactgcccacttggcagtacatcaagtgtatcatatgccaagtacgccccctattgacgtcaatgacggtaaatggcccgcctggcattatgcccagtacatgaccttatgggactttcctacttggcagtacatctacgtattagtcatcgctattaccatggtgatgcggttttggcagtacatcaatgggcgtggatagcggtttgactcacggggatttccaagtctccaccccattgacgtcaatgggagtttgttttggcaccaaaatcaacgggactttccaaaatgtcgtaacaactccgccccattgacgcaaatgggcggtaggcgtgtacggtgggaggtctatataagcagagctcgtttagtgaaccgtcagatcgcctggagacgccatccacgctgttttgacctccatagaagacaccgggaccgatccagcctccatcggctcgcatctctccttcacgcgcccgccgccctacctgaggccgccatccacgccggttgagtcgcgttctgccgcctcccgcctgtggtgcctcctgaactgcgtccgccgtctaggtaagtttaaagctcaggtcgagaccgggcctttgtccggcgctcccttggagcctacctagactcagccggctctccacgctttgcctgaccctgcttgctcaactctagttaacggtggagggcagtgtagtctgagcagtactcgttgctgccgcgcgcgccaccagacataatagctgacagactaacagactgttcctttccatgggtcttttctgcagtcaccgtcgtcgacacgtgtgatcagatatcgcggccgctctagaccaccatgggatggtcatgtatcatcctttttctagtagcaactgcaaccggtgtacattcccaggtgcagctggtgcagtctggaggtcagatgaagaagcctggcgagtcgatgagaatttcttgtcgggcttctggatatgaatttattgattgtccgattaattggattcgtctggcccccggaaaaaggcctgagtggatgggatggctgaagcctcggtggggggccgtcaactacgcacgtccacttcagggcagagtgaccatgactcgagacgtttattccgacacagcctttttggagctgcgctcgttgacagtagacgacacggccgtctacttttgtactaggggaaaatactgtaccgcgcgtgactattacaattgggacttcgaacactggggccggggcaccccggtcaccgtctcatcaccgtcgaccaagggcccatcggtcttccccctggcaccctcctccaagagcacctctgggggcacagcggccctgggctgcctggtcaaggactacttccccgaaccggtgacggtgtcgtggaactcaggcgccctgaccagcggcgtgcacaccttcccggctgtcctacagtcctcaggactctactccctcagcagcgtggtgaccgtgccctccagcagcttgggcacccagacctacatctgcaacgtgaatcacaagcccagcaacaccaaggtggacaagaaagttgagcccaaatcttgtgacaaaactcacacatgcccaccgtgcccagcacctgaactcctggggggaccgtcagtcttcctcttccccccaaaacccaaggacaccctcatgatctcccggacccctgaggtcacatgcgtggtggtggacgtgagccacgaagaccctgaggtcaagttcaactggtacgtggacggcgtggaggtgcataatgccaagacaaagccgcgggaggagcagtacaacagcacgtaccgtgtggtcagcgtcctcaccgtcctgcaccaggactggctgaatggcaaggagtacaagtgcaaggtctccaacaaagccctcccagcccccatcgagaaaaccatctccaaagccaaagggcagccccgagaaccacaggtgtacaccctgcccccatcccgggatgagctgaccaagaaccaggtcagcctgacctgcctggtcaaaggcttctatcccagcgacatcgccgtggagtgggagagcaatgggcagccggagaacaactacaagaccacgcctcccgtgctggactccgacggctccttcttcctctacagcaagctcaccgtggacaagagcaggtggcagcaggggaacgtcttctcatgctccgtgatgcatgaggctctgcacaaccactacacgcagaagagcctctccctgtctccgggtaaatgatgaggatccagatctgctgtgccttctagttgccagccatctgttgtttgcccctcccccgtgccttccttgaccctggaaggtgccactcccactgtcctttcctaataaaatgaggaaattgcatcgcattgtctgagtaggtgtcattctattctggggggtggggtggggcaggacagcaagggggaggattgggaagacaatagcaggcatgctggggatgcggtgggctctatgggtacccaggtgctgaagaattgacccggttcctcctgggccagaaagaagcaggcacatccccttctctgtgacacaccctgtccacgcccctggttcttagttccagccccactcataggacactcatagctcaggagggctccgccttcaatcccacccgctaaagtacttggagcggtctctccctccctcatcagcccaccaaaccaaacctagcctccaagagtgggaagaaattaaagcaagataggctattaagtgcagagggagagaaaatgcctccaacatgtgaggaagtaatgagagaaatcatagaattttaaggccatgatttaaggccatcatggccttaatcttccgcttcctcgctcactgactcgctgcgctcggtcgttcggctgcggcgagcggtatcagctcactcaaaggcggtaatacggttatccacagaatcaggggataacgcaggaaagaacatgtgagcaaaaggccagcaaaaggccaggaaccgtaaaaaggccgcgttgctggcgtttttccataggctccgcccccctgacgagcatcacaaaaatcgacgctcaagtcagaggtggcgaaacccgacaggactataaagataccaggcgtttccccctggaagctccctcgtgcgctctcctgttccgaccctgccgcttaccggatacctgtccgcctttctcccttcgggaagcgtggcgctttctcatagctcacgctgtaggtatctcagttcggtgtaggtcgttcgctccaagctgggctgtgtgcacgaaccccccgttcagcccgaccgctgcgccttatccggtaactatcgtcttgagtccaacccggtaagacacgacttatcgccactggcagcagccactggtaacaggattagcagagcgaggtatgtaggcggtgctacagagttcttgaagtggtggcctaactacggctacactagaagaacagtatttggtatctgcgctctgctgaagccagttaccttcggaaaaagagttggtagctcttgatccggcaaacaaaccaccgctggtagcggtggtttttttgtttgcaagcagcagattacgcgcagaaaaaaaggatctcaagaagatcctttgatcttttctacggggtctgacgctcagtggaacgaaaactcacgttaagggattttggtcatgagattatcaaaaaggatcttcacctagatccttttaaattaaaaatgaagttttaaatcaatctaaagtatatatgagtaaacttggtctgacagttaccaatgcttaatcagtgaggcacctatctcagcgatctgtctatttcgttcatccatagttgcctgactcggggggggggggcgctgaggtctgcctcgtgaagaaggtgttgctgactcataccaggcctgaatcgccccatcatccagccagaaagtgagggagccacggttgatgagagctttgttgtaggtggaccagttggtgattttgaacttttgctttgccacggaacggtctgcgttgtcgggaagatgcgtgatctgatccttcaactcagcaaaagttcgatttattcaacaaagccgccgtcccgtcaagtcagcgtaatgctctgccagtgttacaaccaattaaccaattctgattagaaaaactcatcgagcatcaaatgaaactgcaatttattcatatcaggattatcaataccatatttttgaaaaagccgtttctgtaatgaaggagaaaactcaccgaggcagttccataggatggcaagatcctggtatcggtctgcgattccgactcgtccaacatcaatacaacctattaatttcccctcgtcaaaaataaggttatcaagtgagaaatcaccatgagtgacgactgaatccggtgagaatggcaaaagcttatgcatttctttccagacttgttcaacaggccagccattacgctcgtcatcaaaatcactcgcatcaaccaaaccgttattcattcgtgattgcgcctgagcgagacgaaatacgcgatcgctgttaaaaggacaattacaaacaggaatcgaatgcaaccggcgcaggaacactgccagcgcatcaacaatattttcacctgaatcaggatattcttctaatacctggaatgctgttttcccggggatcgcagtggtgagtaaccatgcatcatcaggagtacggataaaatgcttgatggtcggaagaggcataaattccgtcagccagtttagtctgaccatctcatctgtaacatcattggcaacgctacctttgccatgtttcagaaacaactctggcgcatcgggcttcccatacaatcgatagattgtcgcacctgattgcccgacattatcgcgagcccatttatacccatataaatcagcatccatgttggaatttaatcgcggcctcgagcaagacgtttcccgttgaatatggctcataacaccccttgtattactgtttatgtaagcagacagttttattgttcatgatgatatatttttatcttgtgcaatgtaacatcagagattttgagacacaacgtggctttccccccccccccattattgaagcatttatcagggttattgtctcatgagcggatacatatttgaatgtatttagaaaaataaacaaataggggttccgcgcacatttccccgaaaagtgccacctgacgtctaagaaaccattattatcatgacattaacctataaaaataggcgtatcacgaggccctttcgtc

SEQ ID NO: 95 - DNA, 1425 bp, Artificial Sequence
  Description of Artificial Sequence: Synthetic polynucleotide
atgggatggtcatgtatcatcctttttctagtagcaactgcaaccggtgtacattcccaggtgcgactgtcgcagtctggaggtcagatgaagaagcctggcgactcgatgagaatttcttgtcgggcttcgggatacgaatttcagaattgtccaataaattggattcggctggcccccggaaaaaggcctgagtggatgggatggatgaagcctaggtggggggccgtcagttacgcacgtcaacttcagggcagagtgaccatgactcgagacatgtattccgagacagcctttttggagctccgttccttgacatccgacgacacggccgtctatttttgtactcggggaaaatattgcactgcgcgcgactattataattgggacttcgaacactggggccagggcaccccggtcaccgtctcgtcagcgtcgaccaagggcccatcggtcttccccctggcaccctcctccaagagcacctctgggggcacagcggccctgggctgcctggtcaaggactacttccccgaaccggtgacggtgtcgtggaactcaggcgccctgaccagcggcgtgcacaccttcccggctgtcctacagtcctcaggactctactccctcagcagcgtggtgaccgtgccctccagcagcttgggcacccagacctacatctgcaacgtgaatcacaagcccagcaacaccaaggtggacaagaaagttgagcccaaatcttgtgacaaaactcacacatgcccaccgtgcccagcacctgaactcctggggggaccgtcagtcttcctcttccccccaaaacccaaggacaccctcatgatctcccggacccctgaggtcacatgcgtggtggtggacgtgagccacgaagaccctgaggtcaagttcaactggtacgtggacggcgtggaggtgcataatgccaagacaaagccgcgggaggagcagtacaacagcacgtaccgtgtggtcagcgtcctcaccgtcctgcaccaggactggctgaatggcaaggagtacaagtgcaaggtctccaacaaagccctcccagcccccatcgagaaaaccatctccaaagccaaagggcagccccgagaaccacaggtgtacaccctgcccccatcccgggatgagctgaccaagaaccaggtcagcctgacctgcctggtcaaaggcttctatcccagcgacatcgccgtggagtgggagagcaatgggcagccggagaacaactacaagaccacgcctcccgtgctggactccgacggctccttcttcctctacagcaagctcaccgtggacaagagcaggtggcagcaggggaacgtcttctcatgctccgtgatgcatgaggctctgcacaaccactacacgcagaagagcctctccctgtctccgggtaaatga

SEQ ID NO: 96 - DNA, 5838 bp, Artificial Sequence
  Description of Artificial Sequence: Synthetic polynucleotide
tcgcgcgtttcggtgatgacggtgaaaacctctgacacatgcagctcccggagacggtcacagcttgtctgtaagcggatgccgggagcagacaagcccgtcagggcgcgtcagcgggtgttggcgggtgtcggggctggcttaactatgcggcatcagagcagattgtactgagagtgcaccatatgcggtgtgaaataccgcacagatgcgtaaggagaaaataccgcatcagattggctattggccattgcatacgttgtatccatatcataatatgtacatttatattggctcatgtccaacattaccgccatgttgacattgattattgactagttattaatagtaatcaattacggggtcattagttcatagcccatatatggagttccgcgttacataacttacggtaaatggcccgcctggctgaccgcccaacgacccccgcccattgacgtcaataatgacgtatgttcccatagtaacgccaatagggactttccattgacgtcaatgggtggagtatttacggtaaactgcccacttggcagtacatcaagtgtatcatatgccaagtacgccccctattgacgtcaatgacggtaaatggcccgcctggcattatgcccagtacatgaccttatgggactttcctacttggcagtacatctacgtattagtcatcgctattaccatggtgatgcggttttggcagtacatcaatgggcgtggatagcggtttgactcacggggatttccaagtctccaccccattgacgtcaatgggagtttgttttggcaccaaaatcaacgggactttccaaaatgtcgtaacaactccgccccattgacgcaaatgggcggtaggcgtgtacggtgggaggtctatataagcagagctcgtttagtgaaccgtcagatcgcctggagacgccatccacgctgttttgacctccatagaagacaccgggaccgatccagcctccatcggctcgcatctctccttcacgcgcccgccgccctacctgaggccgccatccacgccggttgagtcgcgttctgccgcctcccgcctgtggtgcctcctgaactgcgtccgccgtctaggtaagtttaaagctcaggtcgagaccgggcctttgtccggcgctcccttggagcctacctagactcagccggctctccacgctttgcctgaccctgcttgctcaactctagttaacggtggagggcagtgtagtctgagcagtactcgttgctgccgcgcgcgccaccagacataatagctgacagactaacagactgttcctttccatgggtcttttctgcagtcaccgtcgtcgacacgtgtgatcagatatcgcggccgctctagaccaccatgggatggtcatgtatcatcctttttctagtagcaactgcaaccggtgtacattcccaggtgcgactgtcgcagtctggaggtcagatgaagaagcctggcgactcgatgagaatttcttgtcgggcttcgggatacgaatttcagaattgtccaataaattggattcggctggcccccggaaaaaggcctgagtggatgggatggatgaagcctaggtggggggccgtcagttacgcacgtcaacttcagggcagagtgaccatgactcgagacatgtattccgagacagcctttttggagctccgttccttgacatccgacgacacggccgtctatttttgtactcggggaaaatattgcactgcgcgcgactattataattgggacttcgaacactggggccagggcaccccggtcaccgtctcgtcagcgtcgaccaagggcccatcggtcttccccctggcaccctcctccaagagcacctctgggggcacagcggccctgggctgcctggtcaaggactacttccccgaaccggtgacggtgtcgtggaactcaggcgccctgaccagcggcgtgcacaccttcccggctgtcctacagtcctcaggactctactccctcagcagcgtggtgaccgtgccctccagcagcttgggcacccagacctacatctgcaacgtgaatcacaagcccagcaacaccaaggtggacaagaaagttgagcccaaatcttgtgacaaaactcacacatgcccaccgtgcccagcacctgaactcctggggggaccgtcagtcttcctcttccccccaaaacccaaggacaccctcatgatctcccggacccctgaggtcacatgcgtggtggtggacgtgagccacgaagaccctgaggtcaagttcaactggtacgtggacggcgtggaggtgcataatgccaagacaaagccgcgggaggagcagtacaacagcacgtaccgtgtggtcagcgtcctcaccgtcctgcaccaggactggctgaatggcaaggagtacaagtgcaaggtctccaacaaagccctcccagcccccatcgagaaaaccatctccaaagccaaagggcagccccgagaaccacaggtgtacaccctgcccccatcccgggatgagctgaccaagaaccaggtcagcctgacctgcctggtcaaaggcttctatcccagcgacatcgccgtggagtgggagagcaatgggcagccggagaacaactacaagaccacgcctcccgtgctggactccgacggctccttcttcctctacagcaagctcaccgtggacaagagcaggtggcagcaggggaacgtcttctcatgctccgtgatgcatgaggctctgcacaaccactacacgcagaagagcctctccctgtctccgggtaaatgatgaggatccagatctgctgtgccttctagttgccagccatctgttgtttgcccctcccccgtgccttccttgaccctggaaggtgccactcccactgtcctttcctaataaaatgaggaaattgcatcgcattgtctgagtaggtgtcattctattctggggggtggggtggggcaggacagcaagggggaggattgggaagacaatagcaggcatgctggggatgcggtgggctctatgggtacccaggtgctgaagaattgacccggttcctcctgggccagaaagaagcaggcacatccccttctctgtgacacaccctgtccacgcccctggttcttagttccagccccactcataggacactcatagctcaggagggctccgccttcaatcccacccgctaaagtacttggagcggtctctccctccctcatcagcccaccaaaccaaacctagcctccaagagtgggaagaaattaaagcaagataggctattaagtgcagagggagagaaaatgcctccaacatgtgaggaagtaatgagagaaatcatagaattttaaggccatgatttaaggccatcatggccttaatcttccgcttcctcgctcactgactcgctgcgctcggtcgttcggctgcggcgagcggtatcagctcactcaaaggcggtaatacggttatccacagaatcaggggataacgcaggaaagaacatgtgagcaaaaggccagcaaaaggccaggaaccgtaaaaaggccgcgttgctggcgtttttccataggctccgcccccctgacgagcatcacaaaaatcgacgctcaagtcagaggtggcgaaacccgacaggactataaagataccaggcgtttccccctggaagctccctcgtgcgctctcctgttccgaccctgccgcttaccggatacctgtccgcctttctcccttcgggaagcgtggcgctttctcatagctcacgctgtaggtatctcagttcggtgtaggtcgttcgctccaagctgggctgtgtgcacgaaccccccgttcagcccgaccgctgcgccttatccggtaactatcgtcttgagtccaacccggtaagacacgacttatcgccactggcagcagccactggtaacaggattagcagagcgaggtatgtaggcggtgctacagagttcttgaagtggtggcctaactacggctacactagaagaacagtatttggtatctgcgctctgctgaagccagttaccttcggaaaaagagttggtagctcttgatccggcaaacaaaccaccgctggtagcggtggtttttttgtttgcaagcagcagattacgcgcagaaaaaaaggatctcaagaagatcctttgatcttttctacggggtctgacgctcagtggaacgaaaactcacgttaagggattttggtcatgagattatcaaaaaggatcttcacctagatccttttaaattaaaaatgaagttttaaatcaatctaaagtatatatgagtaaacttggtctgacagttaccaatgcttaatcagtgaggcacctatctcagcgatctgtctatttcgttcatccatagttgcctgactcggggggggggggcgctgaggtctgcctcgtgaagaaggtgttgctgactcataccaggcctgaatcgccccatcatccagccagaaagtgagggagccacggttgatgagagctttgttgtaggtggaccagttggtgattttgaacttttgctttgccacggaacggtctgcgttgtcgggaagatgcgtgatctgatccttcaactcagcaaaagttcgatttattcaacaaagccgccgtcccgtcaagtcagcgtaatgctctgccagtgttacaaccaattaaccaattctgattagaaaaactcatcgagcatcaaatgaaactgcaatttattcatatcaggattatcaataccatatttttgaaaaagccgtttctgtaatgaaggagaaaactcaccgaggcagttccataggatggcaagatcctggtatcggtctgcgattccgactcgtccaacatcaatacaacctattaatttcccctcgtcaaaaataaggttatcaagtgagaaatcaccatgagtgacgactgaatccggtgagaatggcaaaagcttatgcatttctttccagacttgttcaacaggccagccattacgctcgtcatcaaaatcactcgcatcaaccaaaccgttattcattcgtgattgcgcctgagcgagacgaaatacgcgatcgctgttaaaaggacaattacaaacaggaatcgaatgcaaccggcgcaggaacactgccagcgcatcaacaatattttcacctgaatcaggatattcttctaatacctggaatgctgttttcccggggatcgcagtggtgagtaaccatgcatcatcaggagtacggataaaatgcttgatggtcggaagaggcataaattccgtcagccagtttagtctgaccatctcatctgtaacatcattggcaacgctacctttgccatgtttcagaaacaactctggcgcatcgggcttcccatacaatcgatagattgtcgcacctgattgcccgacattatcgcgagcccatttatacccatataaatcagcatccatgttggaatttaatcgcggcctcgagcaagacgtttcccgttgaatatggctcataacaccccttgtattactgtttatgtaagcagacagttttattgttcatgatgatatatttttatcttgtgcaatgtaacatcagagattttgagacacaacgtggctttccccccccccccattattgaagcatttatcagggttattgtctcatgagcggatacatatttgaatgtatttagaaaaataaacaaataggggttccgcgcacatttccccgaaaagtgccacctgacgtctaagaaaccattattatcatgacattaacctataaaaataggcgtatcacgaggccctttcgtc

SEQ ID NO: 97 - DNA, 1425 bp, Artificial Sequence; identical to SEQ ID NO: 91
  Description of Artificial Sequence: Synthetic polynucleotide

SEQ ID NO: 98 - DNA, 5838 bp, Artificial Sequence; identical to SEQ ID NO: 92
  Description of Artificial Sequence: Synthetic polynucleotide

SEQ ID NO: 99 - DNA, 1425 bp, Artificial Sequence
  Description of Artificial Sequence: Synthetic polynucleotide
atgggatggtcatgtatcatcctttttctagtagcaactgcaaccggtgtacattcccaggtgcgactgtcgcagtctggaggtcagatgaagaagcctggcgactcgatgagaatttcttgtcgggcttcgggatacgaatttattaattgtccaataaattggattcggctggcccccggaaaaaggcctgagtggatgggatggatgaagcctaggtggggggccgtcaactacgcacgtcaacttcagggcagagtgaccatgactcgagacatgtattccgagacagcctttttggagctccgttccttgacatccgacgacacggccgtctatttttgtactcggggaaaatattgcactgcgcgcgactattataattgggacttcgaacactggggccagggcaccccggtcaccgtctcgtcagcgtcgaccaagggcccatcggtcttccccctggcaccctcctccaagagcacctctgggggcacagcggccctgggctgcctggtcaaggactacttccccgaaccggtgacggtgtcgtggaactcaggcgccctgaccagcggcgtgcacaccttcccggctgtcctacagtcctcaggactctactccctcagcagcgtggtgaccgtgccctccagcagcttgggcacccagacctacatctgcaacgtgaatcacaagcccagcaacaccaaggtggacaagaaagttgagcccaaatcttgtgacaaaactcacacatgcccaccgtgcccagcacctgaactcctggggggaccgtcagtcttcctcttccccccaaaacccaaggacaccctcatgatctcccggacccctgaggtcacatgcgtggtggtggacgtgagccacgaagaccctgaggtcaagttcaactggtacgtggacggcgtggaggtgcataatgccaagacaaagccgcgggaggagcagtacaacagcacgtaccgtgtggtcagcgtcctcaccgtcctgcaccaggactggctgaatggcaaggagtacaagtgcaaggtctccaacaaagccctcccagcccccatcgagaaaaccatctccaaagccaaagggcagccccgagaaccacaggtgtacaccctgcccccatcccgggatgagctgaccaagaaccaggtcagcctgacctgcctggtcaaaggcttctatcccagcgacatcgccgtggagtgggagagcaatgggcagccggagaacaactacaagaccacgcctcccgtgctggactccgacggctccttcttcctctacagcaagctcaccgtggacaagagcaggtggcagcaggggaacgtcttctcatgctccgtgatgcatgaggctctgcacaaccactacacgcagaagagcctctccctgtctccgggtaaatga

SEQ ID NO: 100 - DNA, 5838 bp, Artificial Sequence
  Description of Artificial Sequence: Synthetic polynucleotide
tcgcgcgtttcggtgatgacggtgaaaacctctgacacatgcagctcccggagacggtcacagcttgtctgtaagcggatgccgggagcagacaagcccgtcagggcgcgtcagcgggtgttggcgggtgtcggggctggcttaactatgcggcatcagagcagattgtactgagagtgcaccatatgcggtgtgaaataccgcacagatgcgtaaggagaaaataccgcatcagattggctattggccattgcatacgttgtatccatatcataatatgtacatttatattggctcatgtccaacattaccgccatgttgacattgattattgactagttattaatagtaatcaattacggggtcattagttcatagcccatatatggagttccgcgttacataacttacggtaaatggcccgcctggctgaccgcccaacgacccccgcccattgacgtcaataatgacgtatgttcccatagtaacgccaatagggactttccattgacgtcaatgggtggagtatttacggtaaactgcccacttggcagtacatcaagtgtatcatatgccaagtacgccccctattgacgtcaatgacggtaaatggcccgcctggcattatgcccagtacatgaccttatgggactttcctacttggcagtacatctacgtattagtcatcgctattaccatggtgatgcggttttggcagtacatcaatgggcgtggatagcggtttgactcacggggatttccaagtctccaccccattgacgtcaatgggagtttgttttggcaccaaaatcaacgggactttccaaaatgtcgtaacaactccgccccattgacgcaaatgggcggtaggcgtgtacggtgggaggtctatataagcagagctcgtttagtgaaccgtcagatcgcctggagacgccatccacgctgttttgacctccatagaagacaccgggaccgatccagcctccatcggctcgcatctctccttcacgcgcccgccgccctacctgaggccgccatccacgccggttgagtcgcgttctgccgcctcccgcctgtggtgcctcctgaactgcgtccgccgtctaggtaagtttaaagctcaggtcgagaccgggcctttgtccggcgctcccttggagcctacctagactcagccggctctccacgctttgcctgaccctgcttgctcaactctagttaacggtggagggcagtgtagtctgagcagtactcgttgctgccgcgcgcgccaccagacataatagctgacagactaacagactgttcctttccatgggtcttttctgcagtcaccgtcgtcgacacgtgtgatcagatatcgcggccgctctagaccaccatgggatggtcatgtatcatcctttttctagtagcaactgcaaccggtgtacattcccaggtgcgactgtcgcagtctggaggtcagatgaagaagcctggcgactcgatgagaatttcttgtcgggcttcgggatacgaatttattaattgtccaataaattggattcggctggcccccggaaaaaggcctgagtggatgggatggatgaagcctaggtggggggccgtcaactacgcacgtcaacttcagggcagagtgaccatgactcgagacatgtattccgagacagcctttttggagctccgttccttgacatccgacgacacggccgtctatttttgtactcggggaaaatattgcactgcgcgcgactattataattgggacttcgaacactggggccagggcaccccggtcaccgtctcgtcagcgtcgaccaagggcccatcggtcttccccctggcaccctcctccaagagcacctctgggggcacagcggccctgggctgcctggtcaaggactacttccccgaaccggtgacggtgtcgtggaactcaggcgccctgaccagcggcgtgcacaccttcccggctgtcctacagtcctcaggactctactccctcagcagcgtggtgaccgtgccctccagcagcttgggcacccagacctacatctgcaacgtgaatcacaagcccagcaacaccaaggtggacaagaaagttgagcccaaatcttgtgacaaaactcacacatgcccaccgtgcccagcacctgaactcctggggggaccgtcagtcttcctcttccccccaaaacccaaggacaccctcatgatctcccggacccctgaggtcacatgcgtggtggtggacgtgagccacgaagaccctgaggtcaagttcaactggtacgtggacggcgtggaggtgcataatgccaagacaaagccgcgggaggagcagtacaacagcacgtaccgtgtggtcagcgtcctcaccgtcctgcaccaggactggctgaatggcaaggagtacaagtgcaaggtctccaacaaagccctcccagcccccatcgagaaaaccatctccaaagccaaagggcagccccgagaaccacaggtgtacaccctgcccccatcccgggatgagctgaccaagaaccaggtcagcctgacctgcctggtcaaaggcttctatcccagcgacatcgccgtggagtgggagagcaatgggcagccggagaacaactacaagaccacgcctcccgtgctggactccgacggctccttcttcctctacagcaagctcaccgtggacaagagcaggtggcagcaggggaacgtcttctcatgctccgtgatgcatgaggctctgcacaaccactacacgcagaagagcctctccctgtctccgggtaaatgatgaggatccagatctgctgtgccttctagttgccagccatctgttgtttgcccctcccccgtgccttccttgaccctggaaggtgccactcccactgtcctttcctaataaaatgaggaaattgcatcgcattgtctgagtaggtgtcattctattctggggggtggggtggggcaggacagcaagggggaggattgggaagacaatagcaggcatgctggggatgcggtgggctctatgggtacccaggtgctgaagaattgacccggttcctcctgggccagaaagaagcaggcacatccccttctctgtgacacaccctgtccacgcccctggttcttagttccagccccactcataggacactcatagctcaggagggctccgccttcaatcccacccgctaaagtacttggagcggtctctccctccctcatcagcccaccaaaccaaacctagcctccaagagtgggaagaaattaaagcaagataggctattaagtgcagagggagagaaaatgcctccaacatgtgaggaagtaatgagagaaatcatagaattttaaggccatgatttaaggccatcatggccttaatcttccgcttcctcgctcactgactcgctgcgctcggtcgttcggctgcggcgagcggtatcagctcactcaaaggcggtaatacggttatccacagaatcaggggataacgcaggaaagaacatgtgagcaaaaggccagcaaaaggccaggaaccgtaaaaaggccgcgttgctggcgtttttccataggctccgcccccctgacgagcatcacaaaaatcgacgctcaagtcagaggtggcgaaacccgacaggactataaagataccaggcgtttccccctggaagctccctcgtgcgctctcctgttccgaccctgccgcttaccggatacctgtccgcctttctcccttcgggaagcgtggcgctttctcatagctcacgctgtaggtatctcagttcggtgtaggtcgttcgctccaagctgggctgtgtgcacgaaccccccgttcagcccgaccgctgcgccttatccggtaactatcgtcttgagtccaacccggtaagacacgacttatcgccactggcagcagccactggtaacaggattagcagagcgaggtatgtaggcggtgctacagagttcttgaagtggtggcctaactacggctacactagaagaacagtatttggtatctgcgctctgctgaagccagttaccttcggaaaaagagttggtagctcttgatccggcaaacaaaccaccgctggtagcggtggtttttttgtttgcaagcagcagattacgcgcagaaaaaaaggatctcaagaagatcctttgatcttttctacggggtctgacgctcagtggaacgaaaactcacgttaagggattttggtcatgagattatcaaaaaggatcttcacctagatccttttaaattaaaaatgaagttttaaatcaatctaaagtatatatgagtaaacttggtctgacagttaccaatgcttaatcagtgaggcacctatctcagcgatctgtctatttcgttcatccatagttgcctgactcggggggggggggcgctgaggtctgcctcgtgaagaaggtgttgctgactcataccaggcctgaatcgccccatcatccagccagaaagtgagggagccacggttgatgagagctttgttgtaggtggaccagttggtgattttgaacttttgctttgccacggaacggtctgcgttgtcgggaagatgcgtgatctgatccttcaactcagcaaaagttcgatttattcaacaaagccgccgtcccgtcaagtcagcgtaatgctctgccagtgttacaaccaattaaccaattctgattagaaaaactcatcgagcatcaaatgaaactgcaatttattcatatcaggattatcaataccatatttttgaaaaagccgtttctgtaatgaaggagaaaactcaccgaggcagttccataggatggcaagatcctggtatcggtctgcgattccgactcgtccaacatcaatacaacctattaatttcccctcgtcaaaaataaggttatcaagtgagaaatcaccatgagtgacgactgaatccggtgagaatggcaaaagcttatgcatttctttccagacttgttcaacaggccagccattacgctcgtcatcaaaatcactcgcatcaaccaaaccgttattcattcgtgattgcgcctgagcgagacgaaatacgcgatcgctgttaaaaggacaattacaaacaggaatcgaatgcaaccggcgcaggaacactgccagcgcatcaacaatattttcacctgaatcaggatattcttctaatacctggaatgctgttttcccggggatcgcagtggtgagtaaccatgcatcatcaggagtacggataaaatgcttgatggtcggaagaggcataaattccgtcagccagtttagtctgaccatctcatctgtaacatcattggcaacgctacctttgccatgtttcagaaacaactctggcgcatcgggcttcccatacaatcgatagattgtcgcacctgattgcccgacattatcgcgagcccatttatacccatataaatcagcatccatgttggaatttaatcgcggcctcgagcaagacgtttcccgttgaatatggctcataacaccccttgtattactgtttatgtaagcagacagttttattgttcatgatgatatatttttatcttgtgcaatgtaacatcagagattttgagacacaacgtggctttccccccccccccattattgaagcatttatcagggttattgtctcatgagcggatacatatttgaatgtatttagaaaaataaacaaataggggttccgcgcacatttccccgaaaagtgccacctgacgtctaagaaaccattattatcatgacattaacctataaaaataggcgtatcacgaggccctttcgtc

SEQ ID NO: 101 - DNA, 1425 bp, Artificial Sequence
  Description of Artificial Sequence: Synthetic polynucleotide
atgggatggtcatgtatcatcctttttctagtagcaactgcaaccggtgtacattcccaggtgcgactgtcgcagtctggaggtcagatgaagaagcctggcgactcgatgagaatttcttgtcgggcttcgggatacgaatttattaattgtccaataaattggattcggctggcccccggaaaaaggcctgagtggatgggatggatgaagcctaggttcggggccgtcagttacgcacgtcaacttcagggcagagtgaccatgactcgagacatgtattccgagacagcctttttggagctccgttccttgacatccgacgacacggccgtctatttttgtactcggggaaaatattgcactgcgcgcgactattataattgggacttcgaacactggggccagggcaccccggtcaccgtctcgtcagcgtcgaccaagggcccatcggtcttccccctggcaccctcctccaagagcacctctgggggcacagcggccctgggctgcctggtcaaggactacttccccgaacccgtgacggtgtcgtggaactcaggcgccctgaccagcggcgtgcacaccttcccggctgtcctacagtcctcaggactctactccctcagcagcgtggtgaccgtgccctccagcagcttgggcacccagacctacatctgcaacgtgaatcacaagcccagcaacaccaaggtggacaagaaagttgagcccaaatcttgtgacaaaactcacacatgcccaccgtgcccagcacctgaactcctggggggaccgtcagtcttcctcttccccccaaaacccaaggacaccctcatgatctcccggacccctgaggtcacatgcgtggtggtggacgtgagccacgaagaccctgaggtcaagttcaactggtacgtggacggcgtggaggtgcataatgccaagacaaagccgcgggaggagcagtacaacagcacgtaccgtgtggtcagcgtcctcaccgtcctgcaccaggactggctgaatggcaaggagtacaagtgcaaggtctccaacaaagccctcccagcccccatcgagaaaaccatctccaaagccaaagggcagccccgagaaccacaggtgtacaccctgcccccatcccgggatgagctgaccaagaaccaggtcagcctgacctgcctggtcaaaggcttctatcccagcgacatcgccgtggagtgggagagcaatgggcagccggagaacaactacaagaccacgcctcccgtgctggactccgacggctccttcttcctctacagcaagctcaccgtggacaagagcaggtggcagcaggggaacgtcttctcatgctccgtgatgcatgaggctctgcacaaccactacacgcagaagagcctctccctgtctccgggtaaatga

SEQ ID NO: 102 - protein, 474 aa, Artificial Sequence
  Description of Artificial Sequence: Synthetic polypeptide
MGWSCIILFLVATATGVHSQVRLSQSGGQMKKPGDSMRISCRASGYEFINCPINWIRLAPGKRPEWMGWMKPRFGAVSYARQLQGRVTMTRDMYSETAFLELRSLTSDDTAVYFCTRGKYCTARDYYNWDFEHWGQGTPVTVSSASTKGPSVFPLAPSSKSTSGGTAALGCLVKDYFPEPVTVSWNSGALTSGVHTFPAVLQSSGLYSLSSVVTVPSSSLGTQTYICNVNHKPSNTKVDKKVEPKSCDKTHTCPPCPAPELLGGPSVFLFPPKPKDTLMISRTPEVTCVVVDVSHEDPEVKFNWYVDGVEVHNAKTKPREEQYNSTYRVVSVLTVLHQDWLNGKEYKCKVSNKALPAPIEKTISKAKGQPREPQVYTLPPSRDELTKNQVSLTCLVKGFYPSDIAVEWESNGQPENNYKTTPPVLDSDGSFFLYSKLTVDKSRWQQGNVFSCSVMHEALHNHYTQKSLSLSPGK

SEQ ID NO: 103 - DNA, 1425 bp, Artificial Sequence
  Description of Artificial Sequence: Synthetic polynucleotide
atgggatggtcatgtatcatcctttttctagtagcaactgcaaccggtgtacattcccaggtgcgactgtcgcagtctggaggtcagatgaagaagcctggcgactcgatgagaatttcttgtcgggcttcgggatacgaatttattaattgtccaataaattggattcggctggcccccggaaaaaggcctgagtggatgggatggatgaagcctaggcggggggccgtcagttacgcacgtcaacttcagggcagagtgaccatgactcgagacatgtattccgagacagcctttttggagctccgttccttgacatccgacgacacggccgtctatttttgtactcggggaaaatattgcactgcgcgcgactattataattgggacttcgaacactggggccagggcaccccggtcaccgtctcgtcagcgtcgaccaagggcccatcggtcttccccctggcaccctcctccaagagcacctctgggggcacagcggccctgggctgcctggtcaaggactacttccccgaacccgtgacggtgtcgtggaactcaggcgccctgaccagcggcgtgcacaccttcccggctgtcctacagtcctcaggactctactccctcagcagcgtggtgaccgtgccctccagcagcttgggcacccagacctacatctgcaacgtgaatcacaagcccagcaacaccaaggtggacaagaaagttgagcccaaatcttgtgacaaaactcacacatgcccaccgtgcccagcacctgaactcctggggggaccgtcagtcttcctcttccccccaaaacccaaggacaccctcatgatctcccggacccctgaggtcacatgcgtggtggtggacgtgagccacgaagaccctgaggtcaagttcaactggtacgtggacggcgtggaggtgcataatgccaagacaaagccgcgggaggagcagtacaacagcacgtaccgtgtggtcagcgtcctcaccgtcctgcaccaggactggctgaatggcaaggagtacaagtgcaaggtctccaacaaagccctcccagcccccatcgagaaaaccatctccaaagccaaagggcagccccgagaaccacaggtgtacaccctgcccccatcccgggatgagctgaccaagaaccaggtcagcctgacctgcctggtcaaaggcttctatcccagcgacatcgccgtggagtgggagagcaatgggcagccggagaacaactacaagaccacgcctcccgtgctggactccgacggctccttcttcctctacagcaagctcaccgtggacaagagcaggtggcagcaggggaacgtcttctcatgctccgtgatgcatgaggctctgcacaaccactacacgcagaagagcctctccctgtctccgggtaaatga

SEQ ID NO: 104 - protein, 474 aa, Artificial Sequence [sequence omitted]

SEQ ID NO: 105 - DNA, 1425 bp, Artificial Sequence
  Description of Artificial Sequence: Synthetic polynucleotide
atgggatggtcatgtatcatcctttttctagtagcaactgcaaccggtgtacattcccaggtgcgactgtcgcagtctggaggtcagatgaagaagcctggcgactcgatgagaatttcttgtcgggcttcgggatacgaatttattaattgtccaataaattggattcggctggcccccggaaaaaggcctgagtggatgggatggatgaagcctaggtggggggccgtcagttacgcacgtcaacttcagggcagagtgaccatgactcgagacatgtattccgagacagcctttttggagctccgttccttgacatccgacgacacggccgtctatttttgtactcggggaaaatattgcactgcgcgcgactattataattgggacttcgaacactggggccagggcaccccggtcaccgtctcgtcagcgtcgaccaagggcccatcggtcttccccctggcaccctcctccaagagcacctctgggggcacagcggccctgggctgcctggtcaaggactacttccccgaacccgtgacggtgtcgtggaactcaggcgccctgaccagcggcgtgcacaccttcccggctgtcctacagtcctcaggactctactccctcagcagcgtggtgaccgtgccctccagcagcttgggcacccagacctacatctgcaacgtgaatcacaagcccagcaacaccaaggtggacaagaaagttgagcccaaatcttgtgacaaaactcacacatgcccaccgtgcccagcacctgaactcctggggggaccgtcagtcttcctcttccccccaaaacccaaggacaccctcatgatctcccggacccctgaggtcacatgcgtggtggtggacgtgagccacgaagaccctgaggtcaagttcaactggtacgtggacggcgtggaggtgcataatgccaagacaaagccgcgggaggagcagtacaacagcacgtaccgtgtggtcagcgtcctcaccgtcctgcaccaggactggctgaatggcaaggagtacaagtgcaaggtctccaacaaagccctcccagcccccatcgagaaaaccatctccaaagccaaagggcagccccgagaaccacaggtgtacaccctgcccccatcccgggatgagctgaccaagaaccaggtcagcctgacctgcctggtcaaaggcttctatcccagcgacatcgccgtggagtgggagagcaatgggcagccggagaacaactacaagaccacgcctcccgtgctggactccgacggctccttcttcctctacagcaagctcaccgtggacaagagcaggtggcagcaggggaacgtcttctcatgctccgtgatgcatgaggctctgcacaaccactacacgcagaagagcctctccctgtctccgggtaaatga

SEQ ID NO: 106 - protein, 474 aa, Artificial Sequence
  Description of Artificial Sequence: Synthetic polypeptide
MGWSCIILFLVATATGVHSQVRLSQSGGQMKKPGDSMRISCRASGYEFINCPINWIRLAPGKRPEWMGWMKPRWGAVSYARQLQGRVTMTRDMYSETAFLELRSLTSDDTAVYFCTRGKYCTARDYYNWDFEHWGQGTPVTVSSASTKGPSVFPLAPSSKSTSGGTAALGCLVKDYFPEPVTVSWNSGALTSGVHTFPAVLQSSGLYSLSSVVTVPSSSLGTQTYICNVNHKPSNTKVDKKVEPKSCDKTHTCPPCPAPELLGGPSVFLFPPKPKDTLMISRTPEVTCVVVDVSHEDPEVKFNWYVDGVEVHNAKTKPREEQYNSTYRVVSVLTVLHQDWLNGKEYKCKVSNKALPAPIEKTISKAKGQPREPQVYTLPPSRDELTKNQVSLTCLVKGFYPSDIAVEWESNGQPENNYKTTPPVLDSDGSFFLYSKLTVDKSRWQQGNVFSCSVMHEALHNHYTQKSLSLSPGK

SEQ ID NO: 107 - DNA, 1425 bp, Artificial Sequence
  Description of Artificial Sequence: Synthetic polynucleotide
atgggatggtcatgtatcatcctttttctagtagcaactgcaaccggtgtacattcccaggtgcgactgtcgcagtctggaggtcagatgaagaagcctggcgactcgatgagaatttcttgtcgggcttcgggatacgaatttattaattgtccaataaattggattcggctggcccccggaaaaaggcctgagtggatgggatggatgaagcctaggtacggggccgtcagttacgcacgtcaacttcagggcagagtgaccatgactcgagacatgtattccgagacagcctttttggagctccgttccttgacatccgacgacacggccgtctatttttgtactcggggaaaatattgcactgcgcgcgactattataattgggacttcgaacactggggccagggcaccccggtcaccgtctcgtcagcgtcgaccaagggcccatcggtcttccccctggcaccctcctccaagagcacctctgggggcacagcggccctgggctgcctggtcaaggactacttccccgaacccgtgacggtgtcgtggaactcaggcgccctgaccagcggcgtgcacaccttcccggctgtcctacagtcctcaggactctactccctcagcagcgtggtgaccgtgccctccagcagcttgggcacccagacctacatctgcaacgtgaatcacaagcccagcaacaccaaggtggacaagaaagttgagcccaaatcttgtgacaaaactcacacatgcccaccgtgcccagcacctgaactcctggggggaccgtcagtcttcctcttccccccaaaacccaaggacaccctcatgatctcccggacccctgaggtcacatgcgtggtggtggacgtgagccacgaagaccctgaggtcaagttcaactggtacgtggacggcgtggaggtgcataatgccaagacaaagccgcgggaggagcagtacaacagcacgtaccgtgtggtcagcgtcctcaccgtcctgcaccaggactggctgaatggcaaggagtacaagtgcaaggtctccaacaaagccctcccagcccccatcgagaaaaccatctccaaagccaaagggcagccccgagaaccacaggtgtacaccctgcccccatcccgggatgagctgaccaagaaccaggtcagcctgacctgcctggtcaaaggcttctatcccagcgacatcgccgtggagtgggagagcaatgggcagccggagaacaactacaagaccacgcctcccgtgctggactccgacggctccttcttcctctacagcaagctcaccgtggacaagagcaggtggcagcaggggaacgtcttctcatgctccgtgatgcatgaggctctgcacaaccactacacgcagaagagcctctccctgtctccgggtaaatga

SEQ ID NO: 108 - protein, 474 aa, Artificial Sequence
  Description of Artificial Sequence: Synthetic polypeptide
MGWSCIILFLVATATGVHSQVRLSQSGGQMKKPGDSMRISCRASGYEFINCPINWIRLAPGKRPEWMGWMKPRYGAVSYARQLQGRVTMTRDMYSETAFLELRSLTSDDTAVYFCTRGKYCTARDYYNWDFEHWGQGTPVTVSSASTKGPSVFPLAPSSKSTSGGTAALGCLVKDYFPEPVTVSWNSGALTSGVHTFPAVLQSSGLYSLSSVVTVPSSSLGTQTYICNVNHKPSNTKVDKKVEPKSCDKTHTCPPCPAPELLGGPSVFLFPPKPKDTLMISRTPEVTCVVVDVSHEDPEVKFNWYVDGVEVHNAKTKPREEQYNSTYRVVSVLTVLHQDWLNGKEYKCKVSNKALPAPIEKTISKAKGQPREPQVYTLPPSRDELTKNQVSLTCLVKGFYPSDIAVEWESNGQPENNYKTTPPVLDSDGSFFLYSKLTVDKSRWQQGNVFSCSVMHEALHNHYTQKSLSLSPGK

SEQ ID NO: 109 - DNA, 1425 bp, Artificial Sequence
  Description of Artificial Sequence: Synthetic polynucleotide
atgggatggtcttgtattattctgtttctggtcgcaaccgccacaggggtccactctcaggtgcagctgatgcagtccgggggtcagatgaagaaaccaggcgactcagtgaaggtcagctgcaaagcttccgggtacgagttcatcaactgtcccattaattgggtccggctggcaccaggacagagacctgaatggatgggatggatgaagccacgaggaggagccgtgtcttatgctaggcagctgcagggccgcgtcaccatgacacgagatatgtacagctccaccgcctatctggagctgcggagactgacaagcgacgatactgcagtgtactattgcgccaggggcaaatactgtacagctcgcgactactataactgggattttgaacactggggacagggcactctggtgaccgtctctagtccgtcgaccaagggcccatcggtcttccccctggcaccctcctccaagagcacctctgggggcacagcggccctgggctgcctggtcaaggactacttccccgaacccgtgacggtgtcgtggaactcaggcgccctgaccagcggcgtgcacaccttcccggctgtcctacagtcctcaggactctactccctcagcagcgtggtgaccgtgccctccagcagcttgggcacccagacctacatctgcaacgtgaatcacaagcccagcaacaccaaggtggacaagaaagttgagcccaaatcttgtgacaaaactcacacatgcccaccgtgcccagcacctgaactcctggggggaccgtcagtcttcctcttccccccaaaacccaaggacaccctcatgatctcccggacccctgaggtcacatgcgtggtggtggacgtgagccacgaagaccctgaggtcaagttcaactggtacgtggacggcgtggaggtgcataatgccaagacaaagccgcgggaggagcagtacaacagcacgtaccgtgtggtcagcgtcctcaccgtcctgcaccaggactggctgaatggcaaggagtacaagtgcaaggtctccaacaaagccctcccagcccccatcgagaaaaccatctccaaagccaaagggcagccccgagaaccacaggtgtacaccctgcccccatcccgggatgagctgaccaagaaccaggtcagcctgacctgcctggtcaaaggcttctatcccagcgacatcgccgtggagtgggagagcaatgggcagccggagaacaactacaagaccacgcctcccgtgctggactccgacggctccttcttcctctacagcaagctcaccgtggacaagagcaggtggcagcaggggaacgtcttctcatgctccgtgatgcatgaggctctgcacaaccactacacgcagaagagcctctccctgtctccgggtaaatga

SEQ ID NO: 110 - DNA, 5838 bp, Artificial Sequence
  Description of Artificial Sequence: Synthetic polynucleotide
tcgcgcgtttcggtgatgacggtgaaaacctctgacacatgcagctcccggagacggtcacagcttgtctgtaagcggatgccgggagcagacaagcccgtcagggcgcgtcagcgggtgttggcgggtgtcggggctggcttaactatgcggcatcagagcagattgtactgagagtgcaccatatgcggtgtgaaataccgcacagatgcgtaaggagaaaataccgcatcagattggctattggccattgcatacgttgtatccatatcataatatgtacatttatattggctcatgtccaacattaccgccatgttgacattgattattgactagttattaatagtaatcaattacggggtcattagttcatagcccatatatggagttccgcgttacataacttacggtaaatggcccgcctggctgaccgcccaacgacccccgcccattgacgtcaataatgacgtatgttcccatagtaacgccaatagggactttccattgacgtcaatgggtggagtatttacggtaaactgcccacttggcagtacatcaagtgtatcatatgccaagtacgccccctattgacgtcaatgacggtaaatggcccgcctggcattatgcccagtacatgaccttatgggactttcctacttggcagtacatctacgtattagtcatcgctattaccatggtgatgcggttttggcagtacatcaatgggcgtggatagcggtttgactcacggggatttccaagtctccaccccattgacgtcaatgggagtttgttttggcaccaaaatcaacgggactttccaaaatgtcgtaacaactccgccccattgacgcaaatgggcggtaggcgtgtacggtgggaggtctatataagcagagctcgtttagtgaaccgtcagatcgcctggagacgccatccacgctgttttgacctccatagaagacaccgggaccgatccagcctccatcggctcgcatctctccttcacgcgcccgccgccctacctgaggccgccatccacgccggttgagtcgcgttctgccgcctcccgcctgtggtgcctcctgaactgcgtccgccgtctaggtaagtttaaagctcaggtcgagaccgggcctttgtccggcgctcccttggagcctacctagactcagccggctctccacgctttgcctgaccctgcttgctcaactctagttaacggtggagggcagtgtagtctgagcagtactcgttgctgccgcgcgcgccaccagacataatagctgacagactaacagactgttcctttccatgggtcttttctgcagtcaccgtcctcgacacgtgtgatcagatatcgcggccgctctagaccaccatgggatggtcttgtattattctgtttctggtcgcaaccgccacaggggtccactctcaggtgcagctgatgcagtccgggggtcagatgaagaaaccaggcgactcagtgaaggtcagctgcaaagcttccgggtacgagttcatcaactgtcccattaattgggtccggctggcaccaggacagagacctgaatggatgggatggatgaagccacgaggaggagccgtgtcttatgctaggcagctgcagggccgcgtcaccatgacacgagatatgtacagctccaccgcctatctggagctgcggagactgacaagcgacgatactgcagtgtactattgcgccaggggcaaatactgtacagctcgcgactactataactgggattttgaacactggggacagggcactctggtgaccgtctctagtccgtcgaccaagggcccatcggtcttccccctggcaccctcctccaagagcacctctgggggcacagcggccctgggctgcctggtcaaggactacttccccgaacccgtgacggtgtcgtggaactcaggcgccctgaccagcggcgtgcacaccttcccggctgtcctacagtcctcaggactctactccctcagcagcgtggtgaccgtgccctccagcagcttgggcacccagacctacatctgcaacgtgaatcacaagcccagcaacaccaaggtggacaagaaagttgagcccaaatcttgtgacaaaactcacacatgcccaccgtgcccagcacctgaactcctggggggaccgtcagtcttcctcttccccccaaaacccaaggacaccctcatgatctcccggacccctgaggtcacatgcgtggtggtggacgtgagccacgaagaccctgaggtcaagttcaactggtacgtggacggcgtggaggtgcataatgccaagacaaagccgcgggaggagcagtacaacagcacgtaccgtgtggtcagcgtcctcaccgtcctgcaccaggactggctgaatggcaaggagtacaagtgcaaggtctccaacaaagccctcccagcccccatcgagaaaaccatctccaaagccaaagggcagccccgagaaccacaggtgtacaccctgcccccatcccgggatgagctgaccaagaaccaggtcagcctgacctgcctggtcaaaggcttctatcccagcgacatcgccgtggagtgggagagcaatgggcagccggagaacaactacaagaccacgcctcccgtgctggactccgacggctccttcttcctctacagcaagctcaccgtggacaagagcaggtggcagcaggggaacgtcttctcatgctccgtgatgcatgaggctctgcacaaccactacacgcagaagagcctctccctgtctccgggtaaatgatgaggatccagatctgctgtgccttctagttgccagccatctgttgtttgcccctcccccgtgccttccttgaccctggaaggtgccactcccactgtcctttcctaataaaatgaggaaattgcatcgcattgtctgagtaggtgtcattctattctggggggtggggtggggcaggacagcaagggggaggattgggaagacaatagcaggcatgctggggatgcggtgggctctatgggtacccaggtgctgaagaattgacccggttcctcctgggccagaaagaagcaggcacatccccttctctgtgacacaccctgtccacgcccctggttcttagttccagccccactcataggacactcatagctcaggagggctccgccttcaatcccacccgctaaagtacttggagcggtctctccctccctcatcagcccaccaaaccaaacctagcctccaagagtgggaagaaattaaagcaagataggctattaagtgcagagggagagaaaatgcctccaacatgtgaggaagtaatgagagaaatcatagaattttaaggccatgatttaaggccatcatggccttaatcttccgcttcctcgctcactgactcgctgcgctcggtcgttcggctgcggcgagcggtatcagctcactcaaaggcggtaatacggttatccacagaatcaggggataacgcaggaaagaacatgtgagcaaaaggccagcaaaaggccaggaaccgtaaaaaggccgcgttgctggcgtttttccataggctccgcccccctgacgagcatcacaaaaatcgacgctcaagtcagaggtggcgaaacccgacaggactataaagataccaggcgtttccccctggaagctccctcgtgcgctctcctgttccgaccctgccgcttaccggatacctgtccgcctttctcccttcgggaagcgtggcgctttctcatagctcacgctgtaggtatctcagttcggtgtaggtcgttcgctccaagctgggctgtgtgcacgaaccccccgttcagcccgaccgctgcgccttatccggtaactatcgtcttgagtccaacccggtaagacacgacttatcgccactggcagcagccactggtaacaggattagcagagcgaggtatgtaggcggtgctacagagttcttgaagtggtggcctaactacggctacactagaagaacagtatttggtatctgcgctctgctgaagccagttaccttcggaaaaagagttggtagctcttgatccggcaaacaaaccaccgctggtagcggtggtttttttgtttgcaagcagcagattacgcgcagaaaaaaaggatctcaagaagatcctttgatcttttctacggggtctgacgctcagtggaacgaaaactcacgttaagggattttggtcatgagattatcaaaaaggatcttcacctagatccttttaaattaaaaatgaagttttaaatcaatctaaagtatatatgagtaaacttggtctgacagttaccaatgcttaatcagtgaggcacctatctcagcgatctgtctatttcgttcatccatagttgcctgactcggggggggggggcgctgaggtctgcctcgtgaagaaggtgttgctgactcataccaggcctgaatcgccccatcatccagccagaaagtgagggagccacggttgatgagagctttgttgtaggtggaccagttggtgattttgaacttttgctttgccacggaacggtctgcgttgtcgggaagatgcgtgatctgatccttcaactcagcaaaagttcgatttattcaacaaagccgccgtcccgtcaagtcagcgtaatgctctgccagtgttacaaccaattaaccaattctgattagaaaaactcatcgagcatcaaatgaaactgcaatttattcatatcaggattatcaataccatatttttgaaaaagccgtttctgtaatgaaggagaaaactcaccgaggcagttccataggatggcaagatcctggtatcggtctgcgattccgactcgtccaacatcaatacaacctattaatttcccctcgtcaaaaataaggttatcaagtgagaaatcaccatgagtgacgactgaatccggtgagaatggcaaaagcttatgcatttctttccagacttgttcaacaggccagccattacgctcgtcatcaaaatcactcgcatcaaccaaaccgttattcattcgtgattgcgcctgagcgagacgaaatacgcgatcgctgttaaaaggacaattacaaacaggaatcgaatgcaaccggcgcaggaacactgccagcgcatcaacaatattttcacctgaatcaggatattcttctaatacctggaatgctgttttcccggggatcgcagtggtgagtaaccatgcatcatcaggagtacggataaaatgcttgatggtcggaagaggcataaattccgtcagccagtttagtctgaccatctcatctgtaacatcattggcaacgctacctttgccatgtttcagaaacaactctggcgcatcgggcttcccatacaatcgatagattgtcgcacctgattgcccgacattatcgcgagcccatttatacccatataaatcagcatccatgttggaatttaatcgcggcctcgagcaagacgtttcccgttgaatatggctcataacaccccttgtattactgtttatgtaagcagacagttttattgttcatgatgatatatttttatcttgtgcaatgtaacatcagagattttgagacacaacgtggctttccccccccccccattattgaagcatttatcagggttattgtctcatgagcggatacatatttgaatgtatttagaaaaataaacaaataggggttccgcgcacatttccccgaaaagtgccacctgacgtctaagaaaccattattatcatgacattaacctataaaaataggcgtatcacgaggccctttcgtc

SEQ ID NO: 111 - DNA, 690 bp, Artificial Sequence
  Description of Artificial Sequence: Synthetic polynucleotide
atgggatggtcatgtatcatcctttttctagtagcaactgcaaccggtgtacattcagagatcgtgctgacccagtcccccggcaccctgtccctgtcccccggcgagagggccaccatctcctgcaggacctcccagtacggctccctggcctggtaccagcagaagcccggccaggcccccaggctggtgatctactccggctccaccagggccgccggcatccccgacaggttctccggctccaggtccggccccgactacaccctgaccatctcctccctggagtccggcgacttcggcgtgtactactgccagcagtacgagttcttcggccccggcaccaaggtgcaggtggacatcaagcgtacggtggctgcaccatctgtcttcatcttcccgccatctgatgagcagttgaaatctggaactgcctctgttgtgtgcctgctgaataacttctaccccagagaagccaaagtgcagtggaaggtggacaacgccctgcagagcggaaacagccaggaaagcgtgacagagcaggattccaaggattccacatacagcctgagcagcacactgacactgtccaaggccgactacgagaagcacaaggtgtacgcctgcgaagtgacacaccagggactgtcctcccctgtgacaaagagcttcaacagaggagaatgctga

SEQ ID NO: 112 - DNA, 5102 bp, Artificial Sequence
  Description of Artificial Sequence: Synthetic polynucleotide
tcgcgcgtttcggtgatgacggtgaaaacctctgacacatgcagctcccggagacggtcacagcttgtctgtaagcggatgccgggagcagacaagcccgtcagggcgcgtcagcgggtgttggcgggtgtcggggctggcttaactatgcggcatcagagcagattgtactgagagtgcaccatatgcggtgtgaaataccgcacagatgcgtaaggagaaaataccgcatcagattggctattggccattgcatacgttgtatccatatcataatatgtacatttatattggctcatgtccaacattaccgccatgttgacattgattattgactagttattaatagtaatcaattacggggtcattagttcatagcccatatatggagttccgcgttacataacttacggtaaatggcccgcctggctgaccgcccaacgacccccgcccattgacgtcaataatgacgtatgttcccatagtaacgccaatagggactttccattgacgtcaatgggtggagtatttacggtaaactgcccacttggcagtacatcaagtgtatcatatgccaagtacgccccctattgacgtcaatgacggtaaatggcccgcctggcattatgcccagtacatgaccttatgggactttcctacttggcagtacatctacgtattagtcatcgctattaccatggtgatgcggttttggcagtacatcaatgggcgtggatagcggtttgactcacggggatttccaagtctccaccccattgacgtcaatgggagtttgttttggcaccaaaatcaacgggactttccaaaatgtcgtaacaactccgccccattgacgcaaatgggcggtaggcgtgtacggtgggaggtctatataagcagagctcgtttagtgaaccgtcagatcgcctggagacgccatccacgctgttttgacctccatagaagacaccgggaccgatccagcctccatcggctcgcatctctccttcacgcgcccgccgccctacctgaggccgccatccacgccggttgagtcgcgttctgccgcctcccgcctgtggtgcctcctgaactgcgtccgccgtctaggtaagtttaaagctcaggtcgagaccgggcctttgtccggcgctcccttggagcctacctagactcagccggctctccacgctttgcctgaccctgcttgctcaactctagttaacggtggagggcagtgtagtctgagcagtactcgttgctgccgcgcgcgccaccagacataatagctgacagactaacagactgttcctttccatgggtcttttctgcagtcaccgtcgtcgacacgtgtgatcagatatcgcggccgctctagaccaccatgggatggtcatgtatcatcctttttctagtagcaactgcaaccggtgtacattcagagatcgtgctgacccagtcccccggcaccctgtccctgtcccccggcgagagggccaccatctcctgcaggacctcccagtacggctccctggcctggtaccagcagaagcccggccaggcccccaggctggtgatctactccggctccaccagggccgccggcatccccgacaggttctccggctccaggtccggccccgactacaccctgaccatctcctccctggagtccggcgacttcggcgtgtactactgccagcagtacgagttcttcggccccggcaccaaggtgcaggtggacatcaagcgtacggtggctgcaccatctgtcttcatcttcccgccatctgatgagcagttgaaatctggaactgcctctgttgtgtgcctgctgaataacttctaccccagagaagccaaagtgcagtggaaggtggacaacgccctgcagagcggaaacagccaggaaagcgtgacagagcaggattccaaggattccacatacagcctgagcagcacactgacactgtccaaggccgactacgagaagcacaaggtgtacgcctgcgaagtgacacaccagggactgtcctcccctgtgacaaagagcttcaacagaggagaatgctgataggatccagatctgctgtgccttctagttgccagccatctgttgtttgcccctcccccgtgccttccttgaccctggaaggtgccactcccactgtcctttcctaataaaatgaggaaattgcatcgcattgtctgagtaggtgtcattctattctggggggtggggtggggcaggacagcaagggggaggattgggaagacaatagcaggcatgctggggatgcggtgggctctatgggtacccaggtgctgaagaattgacccggttcctcctgggccagaaagaagcaggcacatccccttctctgtgacacaccctgtccacgcccctggttcttagttccagccccactcataggacactcatagctcaggagggctccgccttcaatcccacccgctaaagtacttggagcggtctctccctccctcatcagcccaccaaaccaaacctagcctccaagagtgggaagaaattaaagcaagataggctattaagtgcagagggagagaaaatgcctccaacatgtgaggaagtaatgagagaaatcatagaattttaaggccatgatttaaggccatcatggccttaatcttccgcttcctcgctcactgactcgctgcgctcggtcgttcggctgcggcgagcggtatcagctcactcaaaggcggtaatacggttatccacagaatcaggggataacgcaggaaagaacatgtgagcaaaaggccagcaaaaggccaggaaccgtaaaaaggccgcgttgctggcgtttttccataggctccgcccccctgacgagcatcacaaaaatcgacgctcaagtcagaggtggcgaaacccgacaggactataaagataccaggcgtttccccctggaagctccctcgtgcgctctcctgttccgaccctgccgcttaccggatacctgtccgcctttctcccttcgggaagcgtggcgctttctcatagctcacgctgtaggtatctcagttcggtgtaggtcgttcgctccaagctgggctgtgtgcacgaaccccccgttcagcccgaccgctgcgccttatccggtaactatcgtcttgagtccaacccggtaagacacgacttatcgccactggcagcagccactggtaacaggattagcagagcgaggtatgtaggcggtgctacagagttcttgaagtggtggcctaactacggctacactagaagaacagtatttggtatctgcgctctgctgaagccagttaccttcggaaaaagagttggtagctcttgatccggcaaacaaaccaccgctggtagcggtggtttttttgtttgcaagcagcagattacgcgcagaaaaaaaggatctcaagaagatcctttgatcttttctacggggtctgacgctcagtggaacgaaaactcacgttaagggattttggtcatgagattatcaaaaaggatcttcacctagatccttttaaattaaaaatgaagttttaaatcaatctaaagtatatatgagtaaacttggtctgacagttaccaatgcttaatcagtgaggcacctatctcagcgatctgtctatttcgttcatccatagttgcctgactcggggggggggggcgctgaggtctgcctcgtgaagaaggtgttgctgactcataccaggcctgaatcgccccatcatccagccagaaagtgagggagccacggttgatgagagctttgttgtaggtggaccagttggtgattttgaacttttgctttgccacggaacggtctgcgttgtcgggaagatgcgtgatctgatccttcaactcagcaaaagttcgatttattcaacaaagccgccgtcccgtcaagtcagcgtaatgctctgccagtgttacaaccaattaaccaattctgattagaaaaactcatcgagcatcaaatgaaactgcaatttattcatatcaggattatcaataccatatttttgaaaaagccgtttctgtaatgaaggagaaaactcaccgaggcagttccataggatggcaagatcctggtatcggtctgcgattccgactcgtccaacatcaatacaacctattaatttcccctcgtcaaaaataaggttatcaagtgagaaatcaccatgagtgacgactgaatccggtgagaatggcaaaagcttatgcatttctttccagacttgttcaacaggccagccattacgctcgtcatcaaaatcactcgcatcaaccaaaccgttattcattcgtgattgcgcctgagcgagacgaaatacgcgatcgctgttaaaaggacaattacaaacaggaatcgaatgcaaccggcgcaggaacactgccagcgcatcaacaatattttcacctgaatcaggatattcttctaatacctggaatgctgttttcccggggatcgcagtggtgagtaaccatgcatcatcaggagtacggataaaatgcttgatggtcggaagaggcataaattccgtcagccagtttagtctgaccatctcatctgtaacatcattggcaacgctacctttgccatgtttcagaaacaactctggcgcatcgggcttcccatacaatcgatagattgtcgcacctgattgcccgacattatcgcgagcccatttatacccatataaatcagcatccatgttggaatttaatcgcggcctcgagcaagacgtttcccgttgaatatggctcataacaccccttgtattactgtttatgtaagcagacagttttattgttcatgatgatatatttttatcttgtgcaatgtaacatcagagattttgagacacaacgtggctttccccccccccccattattgaagcatttatcagggttattgtctcatgagcggatacatatttgaatgtatttagaaaaataaacaaataggggttccgcgcacatttccccgaaaagtgccacctgacgtctaagaaaccattattatcatgacattaacctataaaaataggcgtatcacgaggccctttcgtc

SEQ ID NO: 113 - DNA, 1425 bp, Artificial Sequence
  Description of Artificial Sequence: Synthetic polynucleotide
atgggatggtcatgtatcatcctttttctagtagcaactgcaaccggtgtacattcccaggtgcgactgtcgcagtctggaggtcagatgaagaagcctggcgactcgatgagaatttcttgtcgggcttcgggatacaaatttattaattgtccaataaattggattcggctggcccccggaaaaaggcctgagtggatgggatggatgaagcctaggtggggggccgtcagttacgcacgtcaacttcagggcagagtgaccatgactcgagacatgtattccaagacagcctttttggagctccgttccttgacatccaaggacacggccgtctatttttgtactcggggaaaatattgcactgcgcgcgactattataattgggacttcgaacactggggccagggcaccccggtcaccgtctcgtcagcgtcgaccaagggcccatcggtcttccccctggcaccctcctccaagagcacctctgggggcacagcggccctgggctgcctggtcaaggactacttccccgaacccgtgacggtgtcgtggaactcaggcgccctgaccagcggcgtgcacaccttcccggctgtcctacagtcctcaggactctactccctcagcagcgtggtgaccgtgccctccagcagcttgggcacccagacctacatctgcaacgtgaatcacaagcccagcaacaccaaggtggacaagaaagttgagcccaaatcttgtgacaaaactcacacatgcccaccgtgcccagcacctgaactcctggggggaccgtcagtcttcctcttccccccaaaacccaaggacaccctcatgatctcccggacccctgaggtcacatgcgtggtggtggacgtgagccacgaagaccctgaggtcaagttcaactggtacgtggacggcgtggaggtgcataatgccaagacaaagccgcgggaggagcagtacaacagcacgtaccgtgtggtcagcgtcctcaccgtcctgcaccaggactggctgaatggcaaggagtacaagtgcaaggtctccaacaaagccctcccagcccccatcgagaaaaccatctccaaagccaaagggcagccccgagaaccacaggtgtacaccctgcccccatcccgggatgagctgaccaagaaccaggtcagcctgacctgcctggtcaaaggcttctatcccagcgacatcgccgtggagtgggagagcaatgggcagccggagaacaactacaagaccacgcctcccgtgctggactccgacggctccttcttcctctacagcaagctcaccgtggacaagagcaggtggcagcaggggaacgtcttctcatgctccgtgatgcatgaggctctgcacaaccactacacgcagaagagcctctccctgtctccgggtaaatga

SEQ ID NO: 114 - DNA, 5838 bp, Artificial Sequence
  Description of Artificial Sequence: Synthetic polynucleotide
tcgcgcgtttcggtgatgacggtgaaaacctctgacacatgcagctcccggagacggtcacagcttgtctgtaagcggatgccgggagcagacaagcccgtcagggcgcgtcagcgggtgttggcgggtgtcggggctggcttaactatgcggcatcagagcagattgtactgagagtgcaccatatgcggtgtgaaataccgcacagatgcgtaaggagaaaataccgcatcagattggctattggccattgcatacgttgtatccatatcataatatgtacatttatattggctcatgtccaacattaccgccatgttgacattgattattgactagttattaatagtaatcaattacggggtcattagttcatagcccatatatggagttccgcgttacataacttacggtaaatggcccgcctggctgaccgcccaacgacccccgcccattgacgtcaataatgacgtatgttcccatagtaacgccaatagggactttccattgacgtcaatgggtggagtatttacggtaaactgcccacttggcagtacatcaagtgtatcatatgccaagtacgccccctattgacgtcaatgacggtaaatggcccgcctggcattatgcccagtacatgaccttatgggactttcctacttggcagtacatctacgtattagtcatcgctattaccatggtgatgcggttttggcagtacatcaatgggcgtggatagcggtttgactcacggggatttccaagtctccaccccattgacgtcaatgggagtttgttttggcaccaaaatcaacgggactttccaaaatgtcgtaacaactccgccccattgacgcaaatgggcggtaggcgtgtacggtgggaggtctatataagcagagctcgtttagtgaaccgtcagatcgcctggagacgccatccacgctgttttgacctccatagaagacaccgggaccgatccagcctccatcggctcgcatctctccttcacgcgcccgccgccctacctgaggccgccatccacgccggttgagtcgcgttctgccgcctcccgcctgtggtgcctcctgaactgcgtccgccgtctaggtaagtttaaagctcaggtcgagaccgggcctttgtccggcgctcccttggagcctacctagactcagccggctctccacgctttgcctgaccctgcttgctcaactctagttaacggtggagggcagtgtagtctgagcagtactcgttgctgccgcgcgcgccaccagacataatagctgacagactaacagactgttcctttccatgggtcttttctgcagtcaccgtcctcgacacgtgtgatcagatatcgcggccgctctagaccaccatgggatggtcatgtatcatcctttttctagtagcaactgcaaccggtgtacattcccaggtgcgactgtcgcagtctggaggtcagatgaagaagcctggcgactcgatgagaatttcttgtcgggcttcgggatacaaatttattaattgtccaataaattggattcggctggcccccggaaaaaggcctgagtggatgggatggatgaagcctaggtggggggccgtcagttacgcacgtcaacttcagggcagagtgaccatgactcgagacatgtattccaagacagcctttttggagctccgttccttgacatccaaggacacggccgtctatttttgtactcggggaaaatattgcactgcgcgcgactattataattgggacttcgaacactggggccagggcaccccggtcaccgtctcgtcagcgtcgaccaagggcccatcggtcttccccctggcaccctcctccaagagcacctctgggggcacagcggccctgggctgcctggtcaaggactacttccccgaacccgtgacggtgtcgtggaactcaggcgccctgaccagcggcgtgcacaccttcccggctgtcctacagtcctcaggactctactccctcagcagcgtggtgaccgtgccctccagcagcttgggcacccagacctacatctgcaacgtgaatcacaagcccagcaacaccaaggtggacaagaaagttgagcccaaatcttgtgacaaaactcacacatgcccaccgtgcccagcacctgaactcctggggggaccgtcagtcttcctcttccccccaaaacccaaggacaccctcatgatctcccggacccctgaggtcacatgcgtggtggtggacgtgagccacgaagaccctgaggtcaagttcaactggtacgtggacggcgtggaggtgcataatgccaagacaaagccgcgggaggagcagtacaacagcacgtaccgtgtggtcagcgtcctcaccgtcctgcaccaggactggctgaatggcaaggagtacaagtgcaaggtctccaacaaagccctcccagcccccatcgagaaaaccatctccaaagccaaagggcagccccgagaaccacaggtgtacaccctgcccccatcccgggatgagctgaccaagaaccaggtcagcctgacctgcctggtcaaaggcttctatcccagcgacatcgccgtggagtgggagagcaatgggcagccggagaacaactacaagaccacgcctcccgtgctggactccgacggctccttcttcctctacagcaagctcaccgtggacaagagcaggtggcagcaggggaacgtcttctcatgctccgtgatgcatgaggctctgcacaaccactacacgcagaagagcctctccctgtctccgggtaaatgatgaggatccagatctgctgtgccttctagttgccagccatctgttgtttgcccctcccccgtgccttccttgaccctggaaggtgccactcccactgtcctttcctaataaaatgaggaaattgcatcgcattgtctgagtaggtgtcattctattctggggggtggggtggggcaggacagcaagggggaggattgggaagacaatagcaggcatgctggggatgcggtgggctctatgggtacccaggtgctgaagaattgacccggttcctcctgggccagaaagaagcaggcacatccccttctctgtgacacaccctgtccacgcccctggttcttagttccagccccactcataggacactcatagctcaggagggctccgccttcaatcccacccgctaaagtacttggagcggtctctccctccctcatcagcccaccaaaccaaacctagcctccaagagtgggaagaaattaaagcaagataggctattaagtgcagagggagagaaaatgcctccaacatgtgaggaagtaatgagagaaatcatagaattttaaggccatgatttaaggccatcatggccttaatcttccgcttcctcgctcactgactcgctgcgctcggtcgttcggctgcggcgagcggtatcagctcactcaaaggcggtaatacggttatccacagaatcaggggataacgcaggaaagaacatgtgagcaaaaggccagcaaaaggccaggaaccgtaaaaaggccgcgttgctggcgtttttccataggctccgcccccctgacgagcatcacaaaaatcgacgctcaagtcagaggtggcgaaacccgacaggactataaagataccaggcgtttccccctggaagctccctcgtgcgctctcctgttccgaccctgccgcttaccggatacctgtccgcctttctcccttcgggaagcgtggcgctttctcatagctcacgctgtaggtatctcagttcggtgtaggtcgttcgctccaagctgggctgtgtgcacgaaccccccgttcagcccgaccgctgcgccttatccggtaactatcgtcttgagtccaacccggtaagacacgacttatcgccactggcagcagccactggtaacaggattagcagagcgaggtatgtaggcggtgctacagagttcttgaagtggtggcctaactacggctacactagaagaacagtatttggtatctgcgctctgctgaagccagttaccttcggaaaaagagttggtagctcttgatccggcaaacaaaccaccgctggtagcggtggtttttttgtttgcaagcagcagattacgcgcagaaaaaaaggatctcaagaagatcctttgatcttttctacggggtctgacgctcagtggaacgaaaactcacgttaagggattttggtcatgagattatcaaaaaggatcttcacctagatccttttaaattaaaaatgaagttttaaatcaatctaaagtatatatgagtaaacttggtctgacagttaccaatgcttaatcagtgaggcacctatctcagcgatctgtctatttcgttcatccatagttgcctgactcggggggggggggcgctgaggtctgcctcgtgaagaaggtgttgctgactcataccaggcctgaatcgccccatcatccagccagaaagtgagggagccacggttgatgagagctttgttgtaggtggaccagttggtgattttgaacttttgctttgccacggaacggtctgcgttgtcgggaagatgcgtgatctgatccttcaactcagcaaaagttcgatttattcaacaaagccgccgtcccgtcaagtcagcgtaatgctctgccagtgttacaaccaattaaccaattctgattagaaaaactcatcgagcatcaaatgaaactgcaatttattcatatcaggattatcaataccatatttttgaaaaagccgtttctgtaatgaaggagaaaactcaccgaggcagttccataggatggcaagatcctggtatcggtctgcgattccgactcgtccaacatcaatacaacctattaatttcccctcgtcaaaaataaggttatcaagtgagaaatcaccatgagtgacgactgaatccggtgagaatggcaaaagcttatgcatttctttccagacttgttcaacaggccagccattacgctcgtcatcaaaatcactcgcatcaaccaaaccgttattcattcgtgattgcgcctgagcgagacgaaatacgcgatcgctgttaaaaggacaattacaaacaggaatcgaatgcaaccggcgcaggaacactgccagcgcatcaacaatattttcacctgaatcaggatattcttctaatacctggaatgctgttttcccggggatcgcagtggtgagtaaccatgcatcatcaggagtacggataaaatgcttgatggtcggaagaggcataaattccgtcagccagtttagtctgaccatctcatctgtaacatcattggcaacgctacctttgccatgtttcagaaacaactctggcgcatcgggcttcccatacaatcgatagattgtcgcacctgattgcccgacattatcgcgagcccatttatacccatataaatcagcatccatgttggaatttaatcgcggcctcgagcaagacgtttcccgttgaatatggctcataacaccccttgtattactgtttatgtaagcagacagttttattgttcatgatgatatatttttatcttgtgcaatgtaacatcagagattttgagacacaacgtggctttccccccccccccattattgaagcatttatcagggttattgtctcatgagcggatacatatttgaatgtatttagaaaaataaacaaataggggttccgcgcacatttccccgaaaagtgccacctgacgtctaagaaaccattattatcatgacattaacctataaaaataggcgtatcacgaggccctttcgtc

SEQ ID NO: 115 - DNA, 690 bp, Artificial Sequence
  Description of Artificial Sequence: Synthetic polynucleotide
atgggatggtcatgtatcatcctttttctagtagcaactgcaaccggtgtacattcagaaattgtgttgacacagtctccaggcaccctgtctttgtctccaggggaaacagccatcatctcttgtcggaccagtcagtatggttccttagcctggtatcaacagaggcccggccaggcccccaggctcgtcatctattcgggctctactcgggccgctggcatcccagacaggttcagcggcagtcggtgggggccagactacaccctcaccatcagcaacctgaagtcgggagattttggtgtttattattgccagcagtatgaattttttggccaggggaccaaggtccaggtcgacattaaacgtacggtggctgcaccatctgtcttcatcttcccgccatctgatgagcagttgaaatctggaactgcctctgttgtgtgcctgctgaataacttctaccccagagaagccaaagtgcagtggaaggtggacaacgccctgcagagcggaaacagccaggaaagcgtgacagagcaggattccaaggattccacatacagcctgagcagcacactgacactgtccaaggccgactacgagaagcacaaggtgtacgcctgcgaagtgacacaccagggactgtcctcccctgtgacaaagagcttcaacagaggagaatgctga

SEQ ID NO: 116 - DNA, 5102 bp, Artificial Sequence
  Description of Artificial Sequence: Synthetic polynucleotide
tcgcgcgtttcggtgatgacggtgaaaacctctgacacatgcagctcccggagacggtcacagcttgtctgtaagcggatgccgggagcagacaagcccgtcagggcgcgtcagcgggtgttggcgggtgtcggggctggcttaactatgcggcatcagagcagattgtactgagagtgcaccatatgcggtgtgaaataccgcacagatgcgtaaggagaaaataccgcatcagattggctattggccattgcatacgttgtatccatatcataatatgtacatttatattggctcatgtccaacattaccgccatgttgacattgattattgactagttattaatagtaatcaattacggggtcattagttcatagcccatatatggagttccgcgttacataacttacggtaaatggcccgcctggctgaccgcccaacgacccccgcccattgacgtcaataatgacgtatgttcccatagtaacgccaatagggactttccattgacgtcaatgggtggagtatttacggtaaactgcccacttggcagtacatcaagtgtatcatatgccaagtacgccccctattgacgtcaatgacggtaaatggcccgcctggcattatgcccagtacatgaccttatgggactttcctacttggcagtacatctacgtattagtcatcgctattaccatggtgatgcggttttggcagtacatcaatgggcgtggatagcggtttgactcacggggatttccaagtctccaccccattgacgtcaatgggagtttgttttggcaccaaaatcaacgggactttccaaaatgtcgtaacaactccgccccattgacgcaaatgggcggtaggcgtgtacggtgggaggtctatataagcagagctcgtttagtgaaccgtcagatcgcctggagacgccatccacgctgttttgacctccatagaagacaccgggaccgatccagcctccatcggctcgcatctctccttcacgcgcccgccgccctacctgaggccgccatccacgccggttgagtcgcgttctgccgcctcccgcctgtggtgcctcctgaactgcgtccgccgtctaggtaagtttaaagctcaggtcgagaccgggcctttgtccggcgctcccttggagcctacctagactcagccggctctccacgctttgcctgaccctgcttgctcaactctagttaacggtggagggcagtgtagtctgagcagtactcgttgctgccgcgcgcgccaccagacataatagctgacagactaacagactgttcctttccatgggtcttttctgcagtcaccgtcgtcgacacgtgtgatcagatatcgcggccgctctagaccaccatgggatggtcatgtatcatcctttttctagtagcaactgcaaccggtgtacattcagaaattgtgttgacacagtctccaggcaccctgtctttgtctccaggggaaacagccatcatctcttgtcggaccagtcagtatggttccttagcctggtatcaacagaggcccggccaggcccccaggctcgtcatctattcgggctctactcgggccgctggcatcccagacaggttcagcggcagtcggtgggggccagactacaccctcaccatcagcaacctgaagtcgggagattttggtgtttattattgccagcagtatgaattttttggccaggggaccaaggtccaggtcgacattaaacgtacggtggctgcaccatctgtcttcatcttcccgccatctgatgagcagttgaaatctggaactgcctctgttgtgtgcctgctgaataacttctaccccagagaagccaaagtgcagtggaaggtggacaacgccctgcagagcggaaacagccaggaaagcgtgacagagcaggattccaaggattccacatacagcctgagcagcacactgacactgtccaaggccgactacgagaagcacaaggtgtacgcctgcgaagtgacacaccagggactgtcctcccctgtgacaaagagcttcaacagaggagaatgctgataggatccagatctgctgtgccttctagttgccagccatctgttgtttgcccctcccccgtgccttccttgaccctggaaggtgccactcccactgtcctttcctaataaaatgaggaaattgcatcgcattgtctgagtaggtgtcattctattctggggggtggggtggggcaggacagcaagggggaggattgggaagacaatagcaggcatgctggggatgcggtgggctctatgggtacccaggtgctgaagaattgacccggttcctcctgggccagaaagaagcaggcacatccccttctctgtgacacaccctgtccacgcccctggttcttagttccagccccactcataggacactcatagctcaggagggctccgccttcaatcccacccgctaaagtacttggagcggtctctccctccctcatcagcccaccaaaccaaacctagcctccaagagtgggaagaaattaaagcaagataggctattaagtgcagagggagagaaaatgcctccaacatgtgaggaagtaatgagagaaatcatagaattttaaggccatgatttaaggccatcatggccttaatcttccgcttcctcgctcactgactcgctgcgctcggtcgttcggctgcggcgagcggtatcagctcactcaaaggcggtaatacggttatccacagaatcaggggataacgcaggaaagaacatgtgagcaaaaggccagcaaaaggccaggaaccgtaaaaaggccgcgttgctggcgtttttccataggctccgcccccctgacgagcatcacaaaaatcgacgctcaagtcagaggtggcgaaacccgacaggactataaagataccaggcgtttccccctggaagctccctcgtgcgctctcctgttccgaccctgccgcttaccggatacctgtccgcctttctcccttcgggaagcgtggcgctttctcatagctcacgctgtaggtatctcagttcggtgtaggtcgttcgctccaagctgggctgtgtgcacgaaccccccgttcagcccgaccgctgcgccttatccggtaactatcgtcttgagtccaacccggtaagacacgacttatcgccactggcagcagccactggtaacaggattagcagagcgaggtatgtaggcggtgctacagagttcttgaagtggtggcctaactacggctacactagaagaacagtatttggtatctgcgctctgctgaagccagttaccttcggaaaaagagttggtagctcttgatccggcaaacaaaccaccgctggtagcggtggtttttttgtttgcaagcagcagattacgcgcagaaaaaaaggatctcaagaagatcctttgatcttttctacggggtctgacgctcagtggaacgaaaactcacgttaagggattttggtcatgagattatcaaaaaggatcttcacctagatccttttaaattaaaaatgaagttttaaatcaatctaaagtatatatgagtaaacttggtctgacagttaccaatgcttaatcagtgaggcacctatctcagcgatctgtctatttcgttcatccatagttgcctgactcggggggggggggcgctgaggtctgcctcgtgaagaaggtgttgctgactcataccaggcctgaatcgccccatcatccagccagaaagtgagggagccacggttgatgagagctttgttgtaggtggaccagttggtgattttgaacttttgctttgccacggaacggtctgcgttgtcgggaagatgcgtgatctgatccttcaactcagcaaaagttcgatttattcaacaaagccgccgtcccgtcaagtcagcgtaatgctctgccagtgttacaaccaattaaccaattctgattagaaaaactcatcgagcatcaaatgaaactgcaatttattcatatcaggattatcaataccatatttttgaaaaagccgtttctgtaatgaaggagaaaactcaccgaggcagttccataggatggcaagatcctggtatcggtctgcgattccgactcgtccaacatcaatacaacctattaatttcccctcgtcaaaaataaggttatcaagtgagaaatcaccatgagtgacgactgaatccggtgagaatggcaaaagcttatgcatttctttccagacttgttcaacaggccagccattacgctcgtcatcaaaatcactcgcatcaaccaaaccgttattcattcgtgattgcgcctgagcgagacgaaatacgcgatcgctgttaaaaggacaattacaaacaggaatcgaatgcaaccggcgcaggaacactgccagcgcatcaacaatattttcacctgaatcaggatattcttctaatacctggaatgctgttttcccggggatcgcagtggtgagtaaccatgcatcatcaggagtacggataaaatgcttgatggtcggaagaggcataaattccgtcagccagtttagtctgaccatctcatctgtaacatcattggcaacgctacctttgccatgtttcagaaacaactctggcgcatcgggcttcccatacaatcgatagattgtcgcacctgattgcccgacattatcgcgagcccatttatacccatataaatcagcatccatgttggaatttaatcgcggcctcgagcaagacgtttcccgttgaatatggctcataacaccccttgtattactgtttatgtaagcagacagttttattgttcatgatgatatatttttatcttgtgcaatgtaacatcagagattttgagacacaacgtggctttccccccccccccattattgaagcatttatcagggttattgtctcatgagcggatacatatttgaatgtatttagaaaaataaacaaataggggttccgcgcacatttccccgaaaagtgccacctgacgtctaagaaaccattattatcatgacattaacctataaaaataggcgtatcacgaggccctttcgtc

SEQ ID NO: 117 - DNA, 1425 bp, Artificial Sequence
  Description of Artificial Sequence: Synthetic polynucleotide
atgggatggtcatgtatcatcctttttctagtagcaactgcaaccggtgtacattcccaggtgcgactgtcgcagtctggaggtcagatgaagaagcctggcgactcgatgagaatttcttgtcgggcttcgggatacgaatttattaattgtccaataaattggattcggctggcccccggaaaaaggcctgagtggatgggatggatgaagcctaggtggggggccgtcagttacgcacgtcaacttcagggcagagtgaccatgactcgagacatgtattccgagacagcccatttggagctccgttccttgacatccgacgacacggccacctatttttgtactcggggaaaatattgcactgcgcgcgactattataattgggacttcgaacactggggccagggcaccccggtcaccgtctcgtcagcgtcgaccaagggcccatcggtcttccccctggcaccctcctccaagagcacctctgggggcacagcggccctgggctgcctggtcaaggactacttccccgaacccgtgacggtgtcgtggaactcaggcgccctgaccagcggcgtgcacaccttcccggctgtcctacagtcctcaggactctactccctcagcagcgtggtgaccgtgccctccagcagcttgggcacccagacctacatctgcaacgtgaatcacaagcccagcaacaccaaggtggacaagaaagttgagcccaaatcttgtgacaaaactcacacatgcccaccgtgcccagcacctgaactcctggggggaccgtcagtcttcctcttccccccaaaacccaaggacaccctcatgatctcccggacccctgaggtcacatgcgtggtggtggacgtgagccacgaagaccctgaggtcaagttcaactggtacgtggacggcgtggaggtgcataatgccaagacaaagccgcgggaggagcagtacaacagcacgtaccgtgtggtcagcgtcctcaccgtcctgcaccaggactggctgaatggcaaggagtacaagtgcaaggtctccaacaaagccctcccagcccccatcgagaaaaccatctccaaagccaaagggcagccccgagaaccacaggtgtacaccctgcccccatcccgggatgagctgaccaagaaccaggtcagcctgacctgcctggtcaaaggcttctatcccagcgacatcgccgtggagtgggagagcaatgggcagccggagaacaactacaagaccacgcctcccgtgctggactccgacggctccttcttcctctacagcaagctcaccgtggacaagagcaggtggcagcaggggaacgtcttctcatgctccgtgatgcatgaggctctgcacaaccactacacgcagaagagcctctccctgtctccgggtaaatga

SEQ ID NO: 118 - DNA, 5838 bp, Artificial Sequence
  Description of Artificial Sequence: Synthetic polynucleotide
tcgcgcgtttcggtgatgacggtgaaaacctctgacacatgcagctcccggagacggtcacagcttgtctgtaagcggatgccgggagcagacaagcccgtcagggcgcgtcagcgggtgttggcgggtgtcggggctggcttaactatgcggcatcagagcagattgtactgagagtgcaccatatgcggtgtgaaataccgcacagatgcgtaaggagaaaataccgcatcagattggctattggccattgcatacgttgtatccatatcataatatgtacatttatattggctcatgtccaacattaccgccatgttgacattgattattgactagttattaatagtaatcaattacggggtcattagttcatagcccatatatggagttccgcgttacataacttacggtaaatggcccgcctggctgaccgcccaacgacccccgcccattgacgtcaataatgacgtatgttcccatagtaacgccaatagggactttccattgacgtcaatgggtggagtatttacggtaaactgcccacttggcagtacatcaagtgtatcatatgccaagtacgccccctattgacgtcaatgacggtaaatggcccgcctggcattatgcccagtacatgaccttatgggactttcctacttggcagtacatctacgtattagtcatcgctattaccatggtgatgcggttttggcagtacatcaatgggcgtggatagcggtttgactcacggggatttccaagtctccaccccattgacgtcaatgggagtttgttttggcaccaaaatcaacgggactttccaaaatgtcgtaacaactccgccccattgacgcaaatgggcggtaggcgtgtacggtgggaggtctatataagcagagctcgtttagtgaaccgtcagatcgcctggagacgccatccacgctgttttgacctccatagaagacaccgggaccgatccagcctccatcggctcgcatctctccttcacgcgcccgccgccctacctgaggccgccatccacgccggttgagtcgcgttctgccgcctcccgcctgtggtgcctcctgaactgcgtccgccgtctaggtaagtttaaagctcaggtcgagaccgggcctttgtccggcgctcccttggagcctacctagactcagccggctctccacgctttgcctgaccctgcttgctcaactctagttaacggtggagggcagtgtagtctgagcagtactcgttgctgccgcgcgcgccaccagacataatagctgacagactaacagactgttcctttccatgggtcttttctgcagtcaccgtcctcgacacgtgtgatcagatatcgcggccgctctagaccaccatgggatggtcatgtatcatcctttttctagtagcaactgcaaccggtgtacattcccaggtgcgactgtcgcagtctggaggtcagatgaagaagcctggcgactcgatgagaatttcttgtcgggcttcgggatacgaatttattaattgtccaataaattggattcggctggcccccggaaaaaggcctgagtggatgggatggatgaagcctaggtggggggccgtcagttacgcacgtcaacttcagggcagagtgaccatgactcgagacatgtattccgagacagcccatttggagctccgttccttgacatccgacgacacggccacctatttttgtactcggggaaaatattgcactgcgcgcgactattataattgggacttcgaacactggggccagggcaccccggtcaccgtctcgtcagcgtcgaccaagggcccatcggtcttccccctggcaccctcctccaagagcacctctgggggcacagcggccctgggctgcctggtcaaggactacttccccgaacccgtgacggtgtcgtggaactcaggcgccctgaccagcggcgtgcacaccttcccggctgtcctacagtcctcaggactctactccctcagcagcgtggtgaccgtgccctccagcagcttgggcacccagacctacatctgcaacgtgaatcacaagcccagcaacaccaaggtggacaagaaagttgagcccaaatcttgtgacaaaactcacacatgcccaccgtgcccagcacctgaactcctggggggaccgtcagtcttcctcttccccccaaaacccaaggacaccctcatgatctcccggacccctgaggtcacatgcgtggtggtggacgtgagccacgaagaccctgaggtcaagttcaactggtacgtggacggcgtggaggtgcataatgccaagacaaagccgcgggaggagcagtacaacagcacgtaccgtgtggtcagcgtcctcaccgtcctgcaccaggactggctgaatggcaaggagtacaagtgcaaggtctccaacaaagccctcccagcccccatcgagaaaaccatctccaaagccaaagggcagccccgagaaccacaggtgtacaccctgcccccatcccgggatgagctgaccaagaaccaggtcagcctgacctgcctggtcaaaggcttctatcccagcgacatcgccgtggagtgggagagcaatgggcagccggagaacaactacaagaccacgcctcccgtgctggactccgacggctccttcttcctctacagcaagctcaccgtggacaagagcaggtggcagcaggggaacgtcttctcatgctccgtgatgcatgaggctctgcacaaccactacacgcagaagagcctctccctgtctccgggtaaatgatgaggatccagatctgctgtgccttctagttgccagccatctgttgtttgcccctcccccgtgccttccttgaccctggaaggtgccactcccactgtcctttcctaataaaatgaggaaattgcatcgcattgtctgagtaggtgtcattctattctggggggtggggtggggcaggacagcaagggggaggattgggaagacaatagcaggcatgctggggatgcggtgggctctatgggtacccaggtgctgaagaattgacccggttcctcctgggccagaaagaagcaggcacatccccttctctgtgacacaccctgtccacgcccctggttcttagttccagccccactcataggacactcatagctcaggagggctccgccttcaatcccacccgctaaagtacttggagcggtctctccctccctcatcagcccaccaaaccaaacctagcctccaagagtgggaagaaattaaagcaagataggctattaagtgcagagggagagaaaatgcctccaacatgtgaggaagtaatgagagaaatcatagaattttaaggccatgatttaaggccatcatggccttaatcttccgcttcctcgctcactgactcgctgcgctcggtcgttcggctgcggcgagcggtatcagctcactcaaaggcggtaatacggttatccacagaatcaggggataacgcaggaaagaacatgtgagcaaaaggccagcaaaaggccaggaaccgtaaaaaggccgcgttgctggcgtttttccataggctccgcccccctgacgagcatcacaaaaatcgacgctcaagtcagaggtggcgaaacccgacaggactataaagataccaggcgtttccccctggaagctccctcgtgcgctctcctgttccgaccctgccgcttaccggatacctgtccgcctttctcccttcgggaagcgtggcgctttctcatagctcacgctgtaggtatctcagttcggtgtaggtcgttcgctccaagctgggctgtgtgcacgaaccccccgttcagcccgaccgctgcgccttatccggtaactatcgtcttgagtccaacccggtaagacacgacttatcgccactggcagcagccactggtaacaggattagcagagcgaggtatgtaggcggtgctacagagttcttgaagtggtggcctaactacggctacactagaagaacagtatttggtatctgcgctctgctgaagccagttaccttcggaaaaagagttggtagctcttgatccggcaaacaaaccaccgctggtagcggtggtttttttgtttgcaagcagcagattacgcgcagaaaaaaaggatctcaagaagatcctttgatcttttctacggggtctgacgctcagtggaacgaaaactcacgttaagggattttggtcatgagattatcaaaaaggatcttcacctagatccttttaaattaaaaatgaagttttaaatcaatctaaagtatatatgagtaaacttggtctgacagttaccaatgcttaatcagtgaggcacctatctcagcgatctgtctatttcgttcatccatagttgcctgactcggggggggggggcgctgaggtctgcctcgtgaagaaggtgttgctgactcataccaggcctgaatcgccccatcatccagccagaaagtgagggagccacggttgatgagagctttgttgtaggtggaccagttggtgattttgaacttttgctttgccacggaacggtctgcgttgtcgggaagatgcgtgatctgatccttcaactcagcaaaagttcgatttattcaacaaagccgccgtcccgtcaagtcagcgtaatgctctgccagtgttacaaccaattaaccaattctgattagaaaaactcatcgagcatcaaatgaaactgcaatttattcatatcaggattatcaataccatatttttgaaaaagccgtttctgtaatgaaggagaaaactcaccgaggcagttccataggatggcaagatcctggtatcggtctgcgattccgactcgtccaacatcaatacaacctattaatttcccctcgtcaaaaataaggttatcaagtgagaaatcaccatgagtgacgactgaatccggtgagaatggcaaaagcttatgcatttctttccagacttgttcaacaggccagccattacgctcgtcatcaaaatcactcgcatcaaccaaaccgttattcattcgtgattgcgcctgagcgagacgaaatacgcgatcgctgttaaaaggacaattacaaacaggaatcgaatgcaaccggcgcaggaacactgccagcgcatcaacaatattttcacctgaatcaggatattcttctaatacctggaatgctgttttcccggggatcgcagtggtgagtaaccatgcatcatcaggagtacggataaaatgcttgatggtcggaagaggcataaattccgtcagccagtttagtctgaccatctcatctgtaacatcattggcaacgctacctttgccatgtttcagaaacaactctggcgcatcgggcttcccatacaatcgatagattgtcgcacctgattgcccgacattatcgcgagcccatttatacccatataaatcagcatccatgttggaatttaatcgcggcctcgagcaagacgtttcccgttgaatatggctcataacaccccttgtattactgtttatgtaagcagacagttttattgttcatgatgatatatttttatcttgtgcaatgtaacatcagagattttgagacacaacgtggctttccccccccccccattattgaagcatttatcagggttattgtctcatgagcggatacatatttgaatgtatttagaaaaataaacaaataggggttccgcgcacatttccccgaaaagtgccacctgacgtctaagaaaccattattatcatgacattaacctataaaaataggcgtatcacgaggccctttcgtc

SEQ ID NO: 119 - DNA, 690 bp, Artificial Sequence
  Description of Artificial Sequence: Synthetic polynucleotide
atgggatggtcatgtatcatcctttttctagtagcaactgcaaccggtgtacattcagaaattgtgttgacacagtctccaggcaccctgtctttgtctccaggggaaacagccaccatctcttgtcggaccagtcagtatggttccttagcctggtatcaacagaggcccggccaggcccccaggctcgtcatctattcgggctctactcgggccgctggcatcccagacaggttcagcggcagtcggtcggggccagactacaccctcaccatcagcaacctggagtcgggagattttggtgtttattattgccagcagtatgaattttttggccaggggaccaaggtccaggtcgacattaaacgtacggtggctgcaccatctgtcttcatcttcccgccatctgatgagcagttgaaatctggaactgcctctgttgtgtgcctgctgaataacttctaccccagagaagccaaagtgcagtggaaggtggacaacgccctgcagagcggaaacagccaggaaagcgtgacagagcaggattccaaggattccacatacagcctgagcagcacactgacactgtccaaggccgactacgagaagcacaaggtgtacgcctgcgaagtgacacaccagggactgtcctcccctgtgacaaagagcttcaacagaggagaatgctga

SEQ ID NO: 120 - DNA, 5102 bp, Artificial Sequence
  Description of Artificial Sequence: Synthetic polynucleotide
tcgcgcgtttcggtgatgacggtgaaaacctctgacacatgcagctcccggagacggtcacagcttgtctgtaagcggatgccgggagcagacaagcccgtcagggcgcgtcagcgggtgttggcgggtgtcggggctggcttaactatgcggcatcagagcagattgtactgagagtgcaccatatgcggtgtgaaataccgcacagatgcgtaaggagaaaataccgcatcagattggctattggccattgcatacgttgtatccatatcataatatgtacatttatattggctcatgtccaacattaccgccatgttgacattgattattgactagttattaatagtaatcaattacggggtcattagttcatagcccatatatggagttccgcgttacataacttacggtaaatggcccgcctggctgaccgcccaacgacccccgcccattgacgtcaataatgacgtatgttcccatagtaacgccaatagggactttccattgacgtcaatgggtggagtatttacggtaaactgcccacttggcagtacatcaagtgtatcatatgccaagtacgccccctattgacgtcaatgacggtaaatggcccgcctggcattatgcccagtacatgaccttatgggactttcctacttggcagtacatctacgtattagtcatcgctattaccatggtgatgcggttttggcagtacatcaatgggcgtggatagcggtttgactcacggggatttccaagtctccaccccattgacgtcaatgggagtttgttttggcaccaaaatcaacgggactttccaaaatgtcgtaacaactccgccccattgacgcaaatgggcggtaggcgtgtacggtgggaggtctatataagcagagctcgtttagtgaaccgtcagatcgcctggagacgccatccacgctgttttgacctccatagaagacaccgggaccgatccagcctccatcggctcgcatctctccttcacgcgcccgccgccctacctgaggccgccatccacgccggttgagtcgcgttctgccgcctcccgcctgtggtgcctcctgaactgcgtccgccgtctaggtaagtttaaagctcaggtcgagaccgggcctttgtccggcgctcccttggagcctacctagactcagccggctctccacgctttgcctgaccctgcttgctcaactctagttaacggtggagggcagtgtagtctgagcagtactcgttgctgccgcgcgcgccaccagacataatagctgacagactaacagactgttcctttccatgggtcttttctgcagtcaccgtcgtcgacacgtgtgatcagatatcgcggccgctctagaccaccatgggatggtcatgtatcatcctttttctagtagcaactgcaaccggtgtacattcagaaattgtgttgacacagtctccaggcaccctgtctttgtctccaggggaaacagccaccatctcttgtcggaccagtcagtatggttccttagcctggtatcaacagaggcccggccaggcccccaggctcgtcatctattcgggctctactcgggccgctggcatcccagacaggttcagcggcagtcggtcggggccagactacaccctcaccatcagcaacctggagtcgggagattttggtgtttattattgccagcagtatgaattttttggccaggggaccaaggtccaggtcgacattaaacgtacggtggctgcaccatctgtcttcatcttcccgccatctgatgagcagttgaaatctggaactgcctctgttgtgtgcctgctgaataacttctaccccagagaagccaaagtgcagtggaaggtggacaacgccctgcagagcggaaacagccaggaaagcgtgacagagcaggattccaaggattccacatacagcctgagcagcacactgacactgtccaaggccgactacgagaagcacaaggtgtacgcctgcgaagtgacacaccagggactgtcctcccctgtgacaaagagcttcaacagaggagaatgctgataggatccagatctgctgtgccttctagttgccagccatctgttgtttgcccctcccccgtgccttccttgaccctggaaggtgccactcccactgtcctttcctaataaaatgaggaaattgcatcgcattgtctgagtaggtgtcattctattctggggggtggggtggggcaggacagcaagggggaggattgggaagacaatagcaggcatgctggggatgcggtgggctctatgggtacccaggtgctgaagaattgacccggttcctcctgggccagaaagaagcaggcacatccccttctctgtgacacaccctgtccacgcccctggttcttagttccagccccactcataggacactcatagctcaggagggctccgccttcaatcccacccgctaaagtacttggagcggtctctccctccctcatcagcccaccaaaccaaacctagcctccaagagtgggaagaaattaaagcaagataggctattaagtgcagagggagagaaaatgcctccaacatgtgaggaagtaatgagagaaatcatagaattttaaggccatgatttaaggccatcatggccttaatcttccgcttcctcgctcactgactcgctgcgctcggtcgttcggctgcggcgagcggtatcagctcactcaaaggcggtaatacggttatccacagaatcaggggataacgcaggaaagaacatgtgagcaaaaggccagcaaaaggccaggaaccgtaaaaaggccgcgttgctggcgtttttccataggctccgcccccctgacgagcatcacaaaaatcgacgctcaagtcagaggtggcgaaacccgacaggactataaagataccaggcgtttccccctggaagctccctcgtgcgctctcctgttccgaccctgccgcttaccggatacctgtccgcctttctcccttcgggaagcgtggcgctttctcatagctcacgctgtaggtatctcagttcggtgtaggtcgttcgctccaagctgggctgtgtgcacgaaccccccgttcagcccgaccgctgcgccttatccggtaactatcgtcttgagtccaacccggtaagacacgacttatcgccactggcagcagccactggtaacaggattagcagagcgaggtatgtaggcggtgctacagagttcttgaagtggtggcctaactacggctacactagaagaacagtatttggtatctgcgctctgctgaagccagttaccttcggaaaaagagttggtagctcttgatccggcaaacaaaccaccgctggtagcggtggtttttttgtttgcaagcagcagattacgcgcagaaaaaaaggatctcaagaagatcctttgatcttttctacggggtctgacgctcagtggaacgaaaactcacgttaagggattttggtcatgagattatcaaaaaggatcttcacctagatccttttaaattaaaaatgaagttttaaatcaatctaaagtatatatgagtaaacttggtctgacagttaccaatgcttaatcagtgaggcacctatctcagcgatctgtctatttcgttcatccatagttgcctgactcggggggggggggcgctgaggtctgcctcgtgaagaaggtgttgctgactcataccaggcctgaatcgccccatcatccagccagaaagtgagggagccacggttgatgagagctttgttgtaggtggaccagttggtgattttgaacttttgctttgccacggaacggtctgcgttgtcgggaagatgcgtgatctgatccttcaactcagcaaaagttcgatttattcaacaaagccgccgtcccgtcaagtcagcgtaatgctctgccagtgttacaaccaattaaccaattctgattagaaaaactcatcgagcatcaaatgaaactgcaatttattcatatcaggattatcaataccatatttttgaaaaagccgtttctgtaatgaaggagaaaactcaccgaggcagttccataggatggcaagatcctggtatcggtctgcgattccgactcgtccaacatcaatacaacctattaatttcccctcgtcaaaaataaggttatcaagtgagaaatcaccatgagtgacgactgaatccggtgagaatggcaaaagcttatgcatttctttccagacttgttcaacaggccagccattacgctcgtcatcaaaatcactcgcatcaaccaaaccgttattcattcgtgattgcgcctgagcgagacgaaatacgcgatcgctgttaaaaggacaattacaaacaggaatcgaatgcaaccggcgcaggaacactgccagcgcatcaacaatattttcacctgaatcaggatattcttctaatacctggaatgctgttttcccggggatcgcagtggtgagtaaccatgcatcatcaggagtacggataaaatgcttgatggtcggaagaggcataaattccgtcagccagtttagtctgaccatctcatctgtaacatcattggcaacgctacctttgccatgtttcagaaacaactctggcgcatcgggcttcccatacaatcgatagattgtcgcacctgattgcccgacattatcgcgagcccatttatacccatataaatcagcatccatgttggaatttaatcgcggcctcgagcaagacgtttcccgttgaatatggctcataacaccccttgtattactgtttatgtaagcagacagttttattgttcatgatgatatatttttatcttgtgcaatgtaacatcagagattttgagacacaacgtggctttccccccccccccattattgaagcatttatcagggttattgtctcatgagcggatacatatttgaatgtatttagaaaaataaacaaataggggttccgcgcacatttccccgaaaagtgccacctgacgtctaagaaaccattattatcatgacattaacctataaaaataggcgtatcacgaggccctttcgtc

SEQ ID NO: 121 - DNA, 690 bp, Artificial Sequence
  Description of Artificial Sequence: Synthetic polynucleotide
atgggatggtcatgtatcatcctttttctagtagcaactgcaaccggtgtacattcagaaattgtgttgacacagtctccaggcaccctgtctttgtctccaggggaaacagccaccatctcttgtcggaccagtcagtatggttccttagcctggtatcaacagaggcccggccaggcccccaggctcgtcatctattcgggctctactcgggccgctggcatcccagacaggttcagcggcagtcggtcggggccagactacaccctcaccatcagcaacctggagtcgggagattttggtgtttattattgccagcagtatgaattttttggccaggggaccaaggtccagcaggacaataaacgtacggtggctgcaccatctgtcttcatcttcccgccatctgatgagcagttgaaatctggaactgcctctgttgtgtgcctgctgaataacttctaccccagagaagccaaagtgcagtggaaggtggacaacgccctgcagagcggaaacagccaggaaagcgtgacagagcaggattccaaggattccacatacagcctgagcagcacactgacactgtccaaggccgactacgagaagcacaaggtgtacgcctgcgaagtgacacaccagggactgtcctcccctgtgacaaagagcttcaacagaggagaatgctga

SEQ ID NO: 122 - DNA, 5102 bp, Artificial Sequence
  Description of Artificial Sequence: Synthetic polynucleotide
tcgcgcgtttcggtgatgacggtgaaaacctctgacacatgcagctcccggagacggtcacagcttgtctgtaagcggatgccgggagcagacaagcccgtcagggcgcgtcagcgggtgttggcgggtgtcggggctggcttaactatgcggcatcagagcagattgtactgagagtgcaccatatgcggtgtgaaataccgcacagatgcgtaaggagaaaataccgcatcagattggctattggccattgcatacgttgtatccatatcataatatgtacatttatattggctcatgtccaacattaccgccatgttgacattgattattgactagttattaatagtaatcaattacggggtcattagttcatagcccatatatggagttccgcgttacataacttacggtaaatggcccgcctggctgaccgcccaacgacccccgcccattgacgtcaataatgacgtatgttcccatagtaacgccaatagggactttccattgacgtcaatgggtggagtatttacggtaaactgcccacttggcagtacatcaagtgtatcatatgccaagtacgccccctattgacgtcaatgacggtaaatggcccgcctggcattatgcccagtacatgaccttatgggactttcctacttggcagtacatctacgtattagtcatcgctattaccatggtgatgcggttttggcagtacatcaatgggcgtggatagcggtttgactcacggggatttccaagtctccaccccattgacgtcaatgggagtttgttttggcaccaaaatcaacgggactttccaaaatgtcgtaacaactccgccccattgacgcaaatgggcggtaggcgtgtacggtgggaggtctatataagcagagctcgtttagtgaaccgtcagatcgcctggagacgccatccacgctgttttgacctccatagaagacaccgggaccgatccagcctccatcggctcgcatctctccttcacgcgcccgccgccctacctgaggccgccatccacgccggttgagtcgcgttctgccgcctcccgcctgtggtgcctcctgaactgcgtccgccgtctaggtaagtttaaagctcaggtcgagaccgggcctttgtccggcgctcccttggagcctacctagactcagccggctctccacgctttgcctgaccctgcttgctcaactctagttaacggtggagggcagtgtagtctgagcagtactcgttgctgccgcgcgcgccaccagacataatagctgacagactaacagactgttcctttccatgggtcttttctgcagtcaccgtcgtcgacacgtgtgatcagatatcgcggccgctctagaccaccatgggatggtcatgtatcatcctttttctagtagcaactgcaaccggtgtacattcagaaattgtgttgacacagtctccaggcaccctgtctttgtctccaggggaaacagccaccatctcttgtcggaccagtcagtatggttccttagcctggtatcaacagaggcccggccaggcccccaggctcgtcatctattcgggctctactcgggccgctggcatcccagacaggttcagcggcagtcggtcggggccagactacaccctcaccatcagcaacctggagtcgggagattttggtgtttattattgccagcagtatgaattttttggccaggggaccaaggtccagcaggacaataaacgtacggtggctgcaccatctgtcttcatcttcccgccatctgatgagcagttgaaatctggaactgcctctgttgtgtgcctgctgaataacttctaccccagagaagccaaagtgcagtggaaggtggacaacgccctgcagagcggaaacagccaggaaagcgtgacagagcaggattccaaggattccacatacagcctgagcagcacactgacactgtccaaggccgactacgagaagcacaaggtgtacgcctgcgaagtgacacaccagggactgtcctcccctgtgacaaagagcttcaacagaggagaatgctgataggatccagatctgctgtgccttctagttgccagccatctgttgtttgcccctcccccgtgccttccttgaccctggaaggtgccactcccactgtcctttcctaataaaatgaggaaattgcatcgcattgtctgagtaggtgtcattctattctggggggtggggtggggcaggacagcaagggggaggattgggaagacaatagcaggcatgctggggatgcggtgggctctatgggtacccaggtgctgaagaattgacccggttcctcctgggccagaaagaagcaggcacatccccttctctgtgacacaccctgtccacgcccctggttcttagttccagccccactcataggacactcatagctcaggagggctccgccttcaatcccacccgctaaagtacttggagcggtctctccctccctcatcagcccaccaaaccaaacctagcctccaagagtgggaagaaattaaagcaagataggctattaagtgcagagggagagaaaatgcctccaacatgtgaggaagtaatgagagaaatcatagaattttaaggccatgatttaaggccatcatggccttaatcttccgcttcctcgctcactgactcgctgcgctcggtcgttcggctgcggcgagcggtatcagctcactcaaaggcggtaatacggttatccacagaatcaggggataacgcaggaaagaacatgtgagcaaaaggccagcaaaaggccaggaaccgtaaaaaggccgcgttgctggcgtttttccataggctccgcccccctgacgagcatcacaaaaatcgacgctcaagtcagaggtggcgaaacccgacaggactataaagataccaggcgtttccccctggaagctccctcgtgcgctctcctgttccgaccctgccgcttaccggatacctgtccgcctttctcccttcgggaagcgtggcgctttctcatagctcacgctgtaggtatctcagttcggtgtaggtcgttcgctccaagctgggctgtgtgcacgaaccccccgttcagcccgaccgctgcgccttatccggtaactatcgtcttgagtccaacccggtaagacacgacttatcgccactggcagcagccactggtaacaggattagcagagcgaggtatgtaggcggtgctacagagttcttgaagtggtggcctaactacggctacactagaagaacagtatttggtatctgcgctctgctgaagccagttaccttcggaaaaagagttggtagctcttgatccggcaaacaaaccaccgctggtagcggtggtttttttgtttgcaagcagcagattacgcgcagaaaaaaaggatctcaagaagatcctttgatcttttctacggggtctgacgctcagtggaacgaaaactcacgttaagggattttggtcatgagattatcaaaaaggatcttcacctagatccttttaaattaaaaatgaagttttaaatcaatctaaagtatatatgagtaaacttggtctgacagttaccaatgcttaatcagtgaggcacctatctcagcgatctgtctatttcgttcatccatagttgcctgactcggggggggggggcgctgaggtctgcctcgtgaagaaggtgttgctgactcataccaggcctgaatcgccccatcatccagccagaaagtgagggagccacggttgatgagagctttgttgtaggtggaccagttggtgattttgaacttttgctttgccacggaacggtctgcgttgtcgggaagatgcgtgatctgatccttcaactcagcaaaagttcgatttattcaacaaagccgccgtcccgtcaagtcagcgtaatgctctgccagtgttacaaccaattaaccaattctgattagaaaaactcatcgagcatcaaatgaaactgcaatttattcatatcaggattatcaataccatatttttgaaaaagccgtttctgtaatgaaggagaaaactcaccgaggcagttccataggatggcaagatcctggtatcggtctgcgattccgactcgtccaacatcaatacaacctattaatttcccctcgtcaaaaataaggttatcaagtgagaaatcaccatgagtgacgactgaatccggtgagaatggcaaaagcttatgcatttctttccagacttgttcaacaggccagccattacgctcgtcatcaaaatcactcgcatcaaccaaaccgttattcattcgtgattgcgcctgagcgagacgaaatacgcgatcgctgttaaaaggacaattacaaacaggaatcgaatgcaaccggcgcaggaacactgccagcgcatcaacaatattttcacctgaatcaggatattcttctaatacctggaatgctgttttcccggggatcgcagtggtgagtaaccatgcatcatcaggagtacggataaaatgcttgatggtcggaagaggcataaattccgtcagccagtttagtctgaccatctcatctgtaacatcattggcaacgctacctttgccatgtttcagaaacaactctggcgcatcgggcttcccatacaatcgatagattgtcgcacctgattgcccgacattatcgcgagcccatttatacccatataaatcagcatccatgttggaatttaatcgcggcctcgagcaagacgtttcccgttgaatatggctcataacaccccttgtattactgtttatgtaagcagacagttttattgttcatgatgatatatttttatcttgtgcaatgtaacatcagagattttgagacacaacgtggctttccccccccccccattattgaagcatttatcagggttattgtctcatgagcggatacatatttgaatgtatttagaaaaataaacaaataggggttccgcgcacatttccccgaaaagtgccacctgacgtctaagaaaccattattatcatgacattaacctataaaaataggcgtatcacgaggccctttcgtc

SEQ ID NO: 123 - DNA, 1425 bp, Artificial Sequence
  Description of Artificial Sequence: Synthetic polynucleotide
atgggatggtcatgtatcatcctttttctagtagcaactgcaaccggtgtacattcacaggtgcagctggtgcagtccggcgccgaggtgaagaagcccggcgcctccgtgaaggtgtcctgcaaggcctccggctacgagttcatcgactgcaccctgaactgggtgaggcaggcccccggccagaggcccgagtggatgggctggctgaagcccaggggcggcgccgtgaactacgccaggcccctgcagggcagggtgaccatgaccagggacgtgtactcctccaccgcctacatggagctgaggaggctgaggtccgacgacaccgccgtgtactactgcgccaggggcaagtactgcaccgccagggactactacaactgggacttcgagcactggggccagggcaccctggtgaccgtgtcctccccgtcgaccaagggcccatcggtcttccccctggcaccctcctccaagagcacctctgggggcacagcggccctgggctgcctggtcaaggactacttccccgaacccgtgacggtgtcgtggaactcaggcgccctgaccagcggcgtgcacaccttcccggctgtcctacagtcctcaggactctactccctcagcagcgtggtgaccgtgccctccagcagcttgggcacccagacctacatctgcaacgtgaatcacaagcccagcaacaccaaggtggacaagaaagttgagcccaaatcttgtgacaaaactcacacatgcccaccgtgcccagcacctgaactcctggggggaccgtcagtcttcctcttccccccaaaacccaaggacaccctcatgatctcccggacccctgaggtcacatgcgtggtggtggacgtgagccacgaagaccctgaggtcaagttcaactggtacgtggacggcgtggaggtgcataatgccaagacaaagccgcgggaggagcagtacaacagcacgtaccgtgtggtcagcgtcctcaccgtcctgcaccaggactggctgaatggcaaggagtacaagtgcaaggtctccaacaaagccctcccagcccccatcgagaaaaccatctccaaagccaaagggcagccccgagaaccacaggtgtacaccctgcccccatcccgggatgagctgaccaagaaccaggtcagcctgacctgcctggtcaaaggcttctatcccagcgacatcgccgtggagtgggagagcaatgggcagccggagaacaactacaagaccacgcctcccgtgctggactccgacggctccttcttcctctacagcaagctcaccgtggacaagagcaggtggcagcaggggaacgtcttctcatgctccgtgatgcatgaggctctgcacaaccactacacgcagaagagcctctccctgtctccgggtaaatga

SEQ ID NO: 124 - DNA, 5838 bp, Artificial Sequence
  Description of Artificial Sequence: Synthetic polynucleotide
tcgcgcgtttcggtgatgacggtgaaaacctctgacacatgcagctcccggagacggtcacagcttgtctgtaagcggatgccgggagcagacaagcccgtcagggcgcgtcagcgggtgttggcgggtgtcggggctggcttaactatgcggcatcagagcagattgtactgagagtgcaccatatgcggtgtgaaataccgcacagatgcgtaaggagaaaataccgcatcagattggctattggccattgcatacgttgtatccatatcataatatgtacatttatattggctcatgtccaacattaccgccatgttgacattgattattgactagttattaatagtaatcaattacggggtcattagttcatagcccatatatggagttccgcgttacataacttacggtaaatggcccgcctggctgaccgcccaacgacccccgcccattgacgtcaataatgacgtatgttcccatagtaacgccaatagggactttccattgacgtcaatgggtggagtatttacggtaaactgcccacttggcagtacatcaagtgtatcatatgccaagtacgccccctattgacgtcaatgacggtaaatggcccgcctggcattatgcccagtacatgaccttatgggactttcctacttggcagtacatctacgtattagtcatcgctattaccatggtgatgcggttttggcagtacatcaatgggcgtggatagcggtttgactcacggggatttccaagtctccaccccattgacgtcaatgggagtttgttttggcaccaaaatcaacgggactttccaaaatgtcgtaacaactccgccccattgacgcaaatgggcggtaggcgtgtacggtgggaggtctatataagcagagctcgtttagtgaaccgtcagatcgcctggagacgccatccacgctgttttgacctccatagaagacaccgggaccgatccagcctccatcggctcgcatctctccttcacgcgcccgccgccctacctgaggccgccatccacgccggttgagtcgcgttctgccgcctcccgcctgtggtgcctcctgaactgcgtccgccgtctaggtaagtttaaagctcaggtcgagaccgggcctttgtccggcgctcccttggagcctacctagactcagccggctctccacgctttgcctgaccctgcttgctcaactctagttaacggtggagggcagtgtagtctgagcagtactcgttgctgccgcgcgcgccaccagacataatagctgacagactaacagactgttcctttccatgggtcttttctgcagtcaccgtcgtcgacacgtgtgatcagatatcgcggccgctctagaccaccatgggatggtcatgtatcatcctttttctagtagcaactgcaaccggtgtacattcacaggtgcagctggtgcagtccggcgccgaggtgaagaagcccggcgcctccgtgaaggtgtcctgcaaggcctccggctacgagttcatcgactgcaccctgaactgggtgaggcaggcccccggccagaggcccgagtggatgggctggctgaagcccaggggcggcgccgtgaactacgccaggcccctgcagggcagggtgaccatgaccagggacgtgtactcctccaccgcctacatggagctgaggaggctgaggtccgacgacaccgccgtgtactactgcgccaggggcaagtactgcaccgccagggactactacaactgggacttcgagcactggggccagggcaccctggtgaccgtgtcctccccgtcgaccaagggcccatcggtcttccccctggcaccctcctccaagagcacctctgggggcacagcggccctgggctgcctggtcaaggactacttccccgaacccgtgacggtgtcgtggaactcaggcgccctgaccagcggcgtgcacaccttcccggctgtcctacagtcctcaggactctactccctcagcagcgtggtgaccgtgccctccagcagcttgggcacccagacctacatctgcaacgtgaatcacaagcccagcaacaccaaggtggacaagaaagttgagcccaaatcttgtgacaaaactcacacatgcccaccgtgcccagcacctgaactcctggggggaccgtcagtcttcctcttccccccaaaacccaaggacaccctcatgatctcccggacccctgaggtcacatgcgtggtggtggacgtgagccacgaagaccctgaggtcaagttcaactggtacgtggacggcgtggaggtgcataatgccaagacaaagccgcgggaggagcagtacaacagcacgtaccgtgtggtcagcgtcctcaccgtcctgcaccaggactggctgaatggcaaggagtacaagtgcaaggtctccaacaaagccctcccagcccccatcgagaaaaccatctccaaagccaaagggcagccccgagaaccacaggtgtacaccctgcccccatcccgggatgagctgaccaagaaccaggtcagcctgacctgcctggtcaaaggcttctatcccagcgacatcgccgtggagtgggagagcaatgggcagccggagaacaactacaagaccacgcctcccgtgctggactccgacggctccttcttcctctacagcaagctcaccgtggacaagagcaggtggcagcaggggaacgtcttctcatgctccgtgatgcatgaggctctgcacaaccactacacgcagaagagcctctccctgtctccgggtaaatgatgaggatccagatctgctgtgccttctagttgccagccatctgttgtttgcccctcccccgtgccttccttgaccctggaaggtgccactcccactgtcctttcctaataaaatgaggaaattgcatcgcattgtctgagtaggtgtcattctattctggggggtggggtggggcaggacagcaagggggaggattgggaagacaatagcaggcatgctggggatgcggtgggctctatgggtacccaggtgctgaagaattgacccggttcctcctgggccagaaagaagcaggcacatccccttctctgtgacacaccctgtccacgcccctggttcttagttccagccccactcataggacactcatagctcaggagggctccgccttcaatcccacccgctaaagtacttggagcggtctctccctccctcatcagcccaccaaaccaaacctagcctccaagagtgggaagaaattaaagcaagataggctattaagtgcagagggagagaaaatgcctccaacatgtgaggaagtaatgagagaaatcatagaattttaaggccatgatttaaggccatcatggccttaatcttccgcttcctcgctcactgactcgctgcgctcggtcgttcggctgcggcgagcggtatcagctcactcaaaggcggtaatacggttatccacagaatcaggggataacgcaggaaagaacatgtgagcaaaaggccagcaaaaggccaggaaccgtaaaaaggccgcgttgctggcgtttttccataggctccgcccccctgacgagcatcacaaaaatcgacgctcaagtcagaggtggcgaaacccgacaggactataaagataccaggcgtttccccctggaagctccctcgtgcgctctcctgttccgaccctgccgcttaccggatacctgtccgcctttctcccttcgggaagcgtggcgctttctcatagctcacgctgtaggtatctcagttcggtgtaggtcgttcgctccaagctgggctgtgtgcacgaaccccccgttcagcccgaccgctgcgccttatccggtaactatcgtcttgagtccaacccggtaagacacgacttatcgccactggcagcagccactggtaacaggattagcagagcgaggtatgtaggcggtgctacagagttcttgaagtggtggcctaactacggctacactagaagaacagtatttggtatctgcgctctgctgaagccagttaccttcggaaaaagagttggtagctcttgatccggcaaacaaaccaccgctggtagcggtggtttttttgtttgcaagcagcagattacgcgcagaaaaaaaggatctcaagaagatcctttgatcttttctacggggtctgacgctcagtggaacgaaaactcacgttaagggattttggtcatgagattatcaaaaaggatcttcacctagatccttttaaattaaaaatgaagttttaaatcaatctaaagtatatatgagtaaacttggtctgacagttaccaatgcttaatcagtgaggcacctatctcagcgatctgtctatttcgttcatccatagttgcctgactcggggggggggggcgctgaggtctgcctcgtgaagaaggtgttgctgactcataccaggcctgaatcgccccatcatccagccagaaagtgagggagccacggttgatgagagctttgttgtaggtggaccagttggtgattttgaacttttgctttgccacggaacggtctgcgttgtcgggaagatgcgtgatctgatccttcaactcagcaaaagttcgatttattcaacaaagccgccgtcccgtcaagtcagcgtaatgctctgccagtgttacaaccaattaaccaattctgattagaaaaactcatcgagcatcaaatgaaactgcaatttattcatatcaggattatcaataccatatttttgaaaaagccgtttctgtaatgaaggagaaaactcaccgaggcagttccataggatggcaagatcctggtatcggtctgcgattccgactcgtccaacatcaatacaacctattaatttcccctcgtcaaaaataaggttatcaagtgagaaatcaccatgagtgacgactgaatccggtgagaatggcaaaagcttatgcatttctttccagacttgttcaacaggccagccattacgctcgtcatcaaaatcactcgcatcaaccaaaccgttattcattcgtgattgcgcctgagcgagacgaaatacgcgatcgctgttaaaaggacaattacaaacaggaatcgaatgcaaccggcgcaggaacactgccagcgcatcaacaatattttcacctgaatcaggatattcttctaatacctggaatgctgttttcccggggatcgcagtggtgagtaaccatgcatcatcaggagtacggataaaatgcttgatggtcggaagaggcataaattccgtcagccagtttagtctgaccatctcatctgtaacatcattggcaacgctacctttgccatgtttcagaaacaactctggcgcatcgggcttcccatacaatcgatagattgtcgcacctgattgcccgacattatcgcgagcccatttatacccatataaatcagcatccatgttggaatttaatcgcggcctcgagcaagacgtttcccgttgaatatggctcataacaccccttgtattactgtttatgtaagcagacagttttattgttcatgatgatatatttttatcttgtgcaatgtaacatcagagattttgagacacaacgtggctttccccccccccccattattgaagcatttatcagggttattgtctcatgagcggatacatatttgaatgtatttagaaaaataaacaaataggggttccgcgcacatttccccgaaaagtgccacctgacgtctaagaaaccattattatcatgacattaacctataaaaataggcgtatcacgaggccctttcgtc

SEQ ID NO: 125 - DNA, 1425 bp, Artificial Sequence
  Description of Artificial Sequence: Synthetic polynucleotide
atgggatggtcatgtatcatcctttttctagtagcaactgcaaccggtgtacattcccaagtgcgactgtcgcagtctggaggtcagatgaagaagcctggcgagtcgatgagactttcctgtcgggcttccggatatgaatttctgaattgtccaataaattggattcgcctggcccccggaagacggcctgagtggatgggatggctgaagcctaggggaggggccgtcaattacgcacgtaaatttcagggcagagtgaccatgactcgagacgtgtattccgacacagcctttttggagttgcgctccttgacatcagacgacacggccgtctatttttgtactaggggaaaatattgtactgcgcgcgactattataattgggacttcgaacactggggccggggtgccccggtcaccgtctcgtcagcgtcgaccaagggcccatcggtcttccccctggcaccctcctccaagagcacctctgggggcacagcggccctgggctgcctggtcaaggactacttccccgaacccgtgacggtgtcgtggaactcaggcgccctgaccagcggcgtgcacaccttcccggctgtcctacagtcctcaggactctactccctcagcagcgtggtgaccgtgccctccagcagcttgggcacccagacctacatctgcaacgtgaatcacaagcccagcaacaccaaggtggacaagaaagttgagcccaaatcttgtgacaaaactcacacatgcccaccgtgcccagcacctgaactcctggggggaccgtcagtcttcctcttccccccaaaacccaaggacaccctcatgatctcccggacccctgaggtcacatgcgtggtggtggacgtgagccacgaagaccctgaggtcaagttcaactggtacgtggacggcgtggaggtgcataatgccaagacaaagccgcgggaggagcagtacaacagcacgtaccgtgtggtcagcgtcctcaccgtcctgcaccaggactggctgaatggcaaggagtacaagtgcaaggtctccaacaaagccctcccagcccccatcgagaaaaccatctccaaagccaaagggcagccccgagaaccacaggtgtacaccctgcccccatcccgggatgagctgaccaagaaccaggtcagcctgacctgcctggtcaaaggcttctatcccagcgacatcgccgtggagtgggagagcaatgggcagccggagaacaactacaagaccacgcctcccgtgctggactccgacggctccttcttcctctacagcaagctcaccgtggacaagagcaggtggcagcaggggaacgtcttctcatgctccgtgatgcatgaggctctgcacaaccactacacgcagaagagcctctccctgtctccgggtaaatga

SEQ ID NO: 126 - DNA, 5838 bp, Artificial Sequence
  Description of Artificial Sequence: Synthetic polynucleotide
tcgcgcgtttcggtgatgacggtgaaaacctctgacacatgcagctcccggagacggtcacagcttgtctgtaagcggatgccgggagcagacaagcccgtcagggcgcgtcagcgggtgttggcgggtgtcggggctggcttaactatgcggcatcagagcagattgtactgagagtgcaccatatgcggtgtgaaataccgcacagatgcgtaaggagaaaataccgcatcagattggctattggccattgcatacgttgtatccatatcataatatgtacatttatattggctcatgtccaacattaccgccatgttgacattgattattgactagttattaatagtaatcaattacggggtcattagttcatagcccatatatggagttccgcgttacataacttacggtaaatggcccgcctggctgaccgcccaacgacccccgcccattgacgtcaataatgacgtatgttcccatagtaacgccaatagggactttccattgacgtcaatgggtggagtatttacggtaaactgcccacttggcagtacatcaagtgtatcatatgccaagtacgccccctattgacgtcaatgacggtaaatggcccgcctggcattatgcccagtacatgaccttatgggactttcctacttggcagtacatctacgtattagtcatcgctattaccatggtgatgcggttttggcagtacatcaatgggcgtggatagcggtttgactcacggggatttccaagtctccaccccattgacgtcaatgggagtttgttttggcaccaaaatcaacgggactttccaaaatgtcgtaacaactccgccccattgacgcaaatgggcggtaggcgtgtacggtgggaggtctatataagcagagctcgtttagtgaaccgtcagatcgcctggagacgccatccacgctgttttgacctccatagaagacaccgggaccgatccagcctccatcggctcgcatctctccttcacgcgcccgccgccctacctgaggccgccatccacgccggttgagtcgcgttctgccgcctcccgcctgtggtgcctcctgaactgcgtccgccgtctaggtaagtttaaagctcaggtcgagaccgggcctttgtccggcgctcccttggagcctacctagactcagccggctctccacgctttgcctgaccctgcttgctcaactctagttaacggtggagggcagtgtagtctgagcagtactcgttgctgccgcgcgcgccaccagacataatagctgacagactaacagactgttcctttccatgggtcttttctgcagtcaccgtcgtcgacacgtgtgatcagatatcgcggccgctctagaccaccatgggatggtcatgtatcatcctttttctagtagcaactgcaaccggtgtacattcccaagtgcgactgtcgcagtctggaggtcagatgaagaagcctggcgagtcgatgagactttcctgtcgggcttccggatatgaatttctgaattgtccaataaattggattcgcctggcccccggaagacggcctgagtggatgggatggctgaagcctaggggaggggccgtcaattacgcacgtaaatttcagggcagagtgaccatgactcgagacgtgtattccgacacagcctttttggagttgcgctccttgacatcagacgacacggccgtctatttttgtactaggggaaaatattgtactgcgcgcgactattataattgggacttcgaacactggggccggggtgccccggtcaccgtctcgtcagcgtcgaccaagggcccatcggtcttccccctggcaccctcctccaagagcacctctgggggcacagcggccctgggctgcctggtcaaggactacttccccgaacccgtgacggtgtcgtggaactcaggcgccctgaccagcggcgtgcacaccttcccggctgtcctacagtcctcaggactctactccctcagcagcgtggtgaccgtgccctccagcagcttgggcacccagacctacatctgcaacgtgaatcacaagcccagcaacaccaaggtggacaagaaagttgagcccaaatcttgtgacaaaactcacacatgcccaccgtgcccagcacctgaactcctggggggaccgtcagtcttcctcttccccccaaaacccaaggacaccctcatgatctcccggacccctgaggtcacatgcgtggtggtggacgtgagccacgaagaccctgaggtcaagttcaactggtacgtggacggcgtggaggtgcataatgccaagacaaagccgcgggaggagcagtacaacagcacgtaccgtgtggtcagcgtcctcaccgtcctgcaccaggactggctgaatggcaaggagtacaagtgcaaggtctccaacaaagccctcccagcccccatcgagaaaaccatctccaaagccaaagggcagccccgagaaccacaggtgtacaccctgcccccatcccgggatgagctgaccaagaaccaggtcagcctgacctgcctggtcaaaggcttctatcccagcgacatcgccgtggagtgggagagcaatgggcagccggagaacaactacaagaccacgcctcccgtgctggactccgacggctccttcttcctctacagcaagctcaccgtggacaagagcaggtggcagcaggggaacgtcttctcatgctccgtgatgcatgaggctctgcacaaccactacacgcagaagagcctctccctgtctccgggtaaatgatgaggatccagatctgctgtgccttctagttgccagccatctgttgtttgcccctcccccgtgccttccttgaccctggaaggtgccactcccactgtcctttcctaataaaatgaggaaattgcatcgcattgtctgagtaggtgtcattctattctggggggtggggtggggcaggacagcaagggggaggattgggaagacaatagcaggcatgctggggatgcggtgggctctatgggtacccaggtgctgaagaattgacccggttcctcctgggccagaaagaagcaggcacatccccttctctgtgacacaccctgtccacgcccctggttcttagttccagccccactcataggacactcatagctcaggagggctccgccttcaatcccacccgctaaagtacttggagcggtctctccctccctcatcagcccaccaaaccaaacctagcctccaagagtgggaagaaattaaagcaagataggctattaagtgcagagggagagaaaatgcctccaacatgtgaggaagtaatgagagaaatcatagaattttaaggccatgatttaaggccatcatggccttaatcttccgcttcctcgctcactgactcgctgcgctcggtcgttcggctgcggcgagcggtatcagctcactcaaaggcggtaatacggttatccacagaatcaggggataacgcaggaaagaacatgtgagcaaaaggccagcaaaaggccaggaaccgtaaaaaggccgcgttgctggcgtttttccataggctccgcccccctgacgagcatcacaaaaatcgacgctcaagtcagaggtggcgaaacccgacaggactataaagataccaggcgtttccccctggaagctccctcgtgcgctctcctgttccgaccctgccgcttaccggatacctgtccgcctttctcccttcgggaagcgtggcgctttctcatagctcacgctgtaggtatctcagttcggtgtaggtcgttcgctccaagctgggctgtgtgcacgaaccccccgttcagcccgaccgctgcgccttatccggtaactatcgtcttgagtccaacccggtaagacacgacttatcgccactggcagcagccactggtaacaggattagcagagcgaggtatgtaggcggtgctacagagttcttgaagtggtggcctaactacggctacactagaagaacagtatttggtatctgcgctctgctgaagccagttaccttcggaaaaagagttggtagctcttgatccggcaaacaaaccaccgctggtagcggtggtttttttgtttgcaagcagcagattacgcgcagaaaaaaaggatctcaagaagatcctttgatcttttctacggggtctgacgctcagtggaacgaaaactcacgttaagggattttggtcatgagattatcaaaaaggatcttcacctagatccttttaaattaaaaatgaagttttaaatcaatctaaagtatatatgagtaaacttggtctgacagttaccaatgcttaatcagtgaggcacctatctcagcgatctgtctatttcgttcatccatagttgcctgactcggggggggggggcgctgaggtctgcctcgtgaagaaggtgttgctgactcataccaggcctgaatcgccccatcatccagccagaaagtgagggagccacggttgatgagagctttgttgtaggtggaccagttggtgattttgaacttttgctttgccacggaacggtctgcgttgtcgggaagatgcgtgatctgatccttcaactcagcaaaagttcgatttattcaacaaagccgccgtcccgtcaagtcagcgtaatgctctgccagtgttacaaccaattaaccaattctgattagaaaaactcatcgagcatcaaatgaaactgcaatttattcatatcaggattatcaataccatatttttgaaaaagccgtttctgtaatgaaggagaaaactcaccgaggcagttccataggatggcaagatcctggtatcggtctgcgattccgactcgtccaacatcaatacaacctattaatttcccctcgtcaaaaataaggttatcaagtgagaaatcaccatgagtgacgactgaatccggtgagaatggcaaaagcttatgcatttctttccagacttgttcaacaggccagccattacgctcgtcatcaaaatcactcgcatcaaccaaaccgttattcattcgtgattgcgcctgagcgagacgaaatacgcgatcgctgttaaaaggacaattacaaacaggaatcgaatgcaaccggcgcaggaacactgccagcgcatcaacaatattttcacctgaatcaggatattcttctaatacctggaatgctgttttcccggggatcgcagtggtgagtaaccatgcatcatcaggagtacggataaaatgcttgatggtcggaagaggcataaattccgtcagccagtttagtctgaccatctcatctgtaacatcattggcaacgctacctttgccatgtttcagaaacaactctggcgcatcgggcttcccatacaatcgatagattgtcgcacctgattgcccgacattatcgcgagcccatttatacccatataaatcagcatccatgttggaatttaatcgcggcctcgagcaagacgtttcccgttgaatatggctcataacaccccttgtattactgtttatgtaagcagacagttttattgttcatgatgatatatttttatcttgtgcaatgtaacatcagagattttgagacacaacgtggctttccccccccccccattattgaagcatttatcagggttattgtctcatgagcggatacatatttgaatgtatttagaaaaataaacaaataggggttccgcgcacatttccccgaaaagtgccacctgacgtctaagaaaccattattatcatgacattaacctataaaaataggcgtatcacgaggccctttcgtc

SEQ ID NO: 127 - DNA, 1425 bp, Artificial Sequence
  Description of Artificial Sequence: Synthetic polynucleotide
atgggatggtcatgtatcatcctttttctagtagcaactgcaaccggtgtacattcacaggtgcagctggtgcagtccggcgccgaggtgaagaagcccggcgcctccgtgaaggtgtcctgcaaggcctccggctacgagttcctgaactgccccatcaactgggtgaggcaggcccccggccagggcctggagtggatgggctggctgaagcccaggggcggcgccgtgaactacgccaggaagttccagggcagggtgaccatgaccagggacgtgtacatctccaccgcctacatggagctgtccaggctgaggtccgacgacaccgccgtgtactactgcgccaggggcaagtactgcaccgccagggactactacaactgggacttcgagcactggggccagggcaccctggtgaccgtgtcctccccgtcgaccaagggcccatcggtcttccccctggcaccctcctccaagagcacctctgggggcacagcggccctgggctgcctggtcaaggactacttccccgaacccgtgacggtgtcgtggaactcaggcgccctgaccagcggcgtgcacaccttcccggctgtcctacagtcctcaggactctactccctcagcagcgtggtgaccgtgccctccagcagcttgggcacccagacctacatctgcaacgtgaatcacaagcccagcaacaccaaggtggacaagaaagttgagcccaaatcttgtgacaaaactcacacatgcccaccgtgcccagcacctgaactcctggggggaccgtcagtcttcctcttccccccaaaacccaaggacaccctcatgatctcccggacccctgaggtcacatgcgtggtggtggacgtgagccacgaagaccctgaggtcaagttcaactggtacgtggacggcgtggaggtgcataatgccaagacaaagccgcgggaggagcagtacaacagcacgtaccgtgtggtcagcgtcctcaccgtcctgcaccaggactggctgaatggcaaggagtacaagtgcaaggtctccaacaaagccctcccagcccccatcgagaaaaccatctccaaagccaaagggcagccccgagaaccacaggtgtacaccctgcccccatcccgggatgagctgaccaagaaccaggtcagcctgacctgcctggtcaaaggcttctatcccagcgacatcgccgtggagtgggagagcaatgggcagccggagaacaactacaagaccacgcctcccgtgctggactccgacggctccttcttcctctacagcaagctcaccgtggacaagagcaggtggcagcaggggaacgtcttctcatgctccgtgatgcatgaggctctgcacaaccactacacgcagaagagcctctccctgtctccgggtaaatga

SEQ ID NO: 128 - DNA, 5838 bp, Artificial Sequence
  Description of Artificial Sequence: Synthetic polynucleotide
tcgcgcgtttcggtgatgacggtgaaaacctctgacacatgcagctcccggagacggtcacagcttgtctgtaagcggatgccgggagcagacaagcccgtcagggcgcgtcagcgggtgttggcgggtgtcggggctggcttaactatgcggcatcagagcagattgtactgagagtgcaccatatgcggtgtgaaataccgcacagatgcgtaaggagaaaataccgcatcagattggctattggccattgcatacgttgtatccatatcataatatgtacatttatattggctcatgtccaacattaccgccatgttgacattgattattgactagttattaatagtaatcaattacggggtcattagttcatagcccatatatggagttccgcgttacataacttacggtaaatggcccgcctggctgaccgcccaacgacccccgcccattgacgtcaataatgacgtatgttcccatagtaacgccaatagggactttccattgacgtcaatgggtggagtatttacggtaaactgcccacttggcagtacatcaagtgtatcatatgccaagtacgccccctattgacgtcaatgacggtaaatggcccgcctggcattatgcccagtacatgaccttatgggactttcctacttggcagtacatctacgtattagtcatcgctattaccatggtgatgcggttttggcagtacatcaatgggcgtggatagcggtttgactcacggggatttccaagtctccaccccattgacgtcaatgggagtttgttttggcaccaaaatcaacgggactttccaaaatgtcgtaacaactccgccccattgacgcaaatgggcggtaggcgtgtacggtgggaggtctatataagcagagctcgtttagtgaaccgtcagatcgcctggagacgccatccacgctgttttgacctccatagaagacaccgggaccgatccagcctccatcggctcgcatctctccttcacgcgcccgccgccctacctgaggccgccatccacgccggttgagtcgcgttctgccgcctcccgcctgtggtgcctcctgaactgcgtccgccgtctaggtaagtttaaagctcaggtcgagaccgggcctttgtccggcgctcccttggagcctacctagactcagccggctctccacgctttgcctgaccctgcttgctcaactctagttaacggtggagggcagtgtagtctgagcagtactcgttgctgccgcgcgcgccaccagacataatagctgacagactaacagactgttcctttccatgggtcttttctgcagtcaccgtcgtcgacacgtgtgatcagatatcgcggccgctctagaccaccatgggatggtcatgtatcatcctttttctagtagcaactgcaaccggtgtacattcacaggtgcagctggtgcagtccggcgccgaggtgaagaagcccggcgcctccgtgaaggtgtcctgcaaggcctccggctacgagttcctgaactgccccatcaactgggtgaggcaggcccccggccagggcctggagtggatgggctggctgaagcccaggggcggcgccgtgaactacgccaggaagttccagggcagggtgaccatgaccagggacgtgtacatctccaccgcctacatggagctgtccaggctgaggtccgacgacaccgccgtgtactactgcgccaggggcaagtactgcaccgccagggactactacaactgggacttcgagcactggggccagggcaccctggtgaccgtgtcctccccgtcgaccaagggcccatcggtcttccccctggcaccctcctccaagagcacctctgggggcacagcggccctgggctgcctggtcaaggactacttccccgaacccgtgacggtgtcgtggaactcaggcgccctgaccagcggcgtgcacaccttcccggctgtcctacagtcctcaggactctactccctcagcagcgtggtgaccgtgccctccagcagcttgggcacccagacctacatctgcaacgtgaatcacaagcccagcaacaccaaggtggacaagaaagttgagcccaaatcttgtgacaaaactcacacatgcccaccgtgcccagcacctgaactcctggggggaccgtcagtcttcctcttccccccaaaacccaaggacaccctcatgatctcccggacccctgaggtcacatgcgtggtggtggacgtgagccacgaagaccctgaggtcaagttcaactggtacgtggacggcgtggaggtgcataatgccaagacaaagccgcgggaggagcagtacaacagcacgtaccgtgtggtcagcgtcctcaccgtcctgcaccaggactggctgaatggcaaggagtacaagtgcaaggtctccaacaaagccctcccagcccccatcgagaaaaccatctccaaagccaaagggcagccccgagaaccacaggtgtacaccctgcccccatcccgggatgagctgaccaagaaccaggtcagcctgacctgcctggtcaaaggcttctatcccagcgacatcgccgtggagtgggagagcaatgggcagccggagaacaactacaagaccacgcctcccgtgctggactccgacggctccttcttcctctacagcaagctcaccgtggacaagagcaggtggcagcaggggaacgtcttctcatgctccgtgatgcatgaggctctgcacaaccactacacgcagaagagcctctccctgtctccgggtaaatgatgaggatccagatctgctgtgccttctagttgccagccatctgttgtttgcccctcccccgtgccttccttgaccctggaaggtgccactcccactgtcctttcctaataaaatgaggaaattgcatcgcattgtctgagtaggtgtcattctattctggggggtggggtggggcaggacagcaagggggaggattgggaagacaatagcaggcatgctggggatgcggtgggctctatgggtacccaggtgctgaagaattgacccggttcctcctgggccagaaagaagcaggcacatccccttctctgtgacacaccctgtccacgcccctggttcttagttccagccccactcataggacactcatagctcaggagggctccgccttcaatcccacccgctaaagtacttggagcggtctctccctccctcatcagcccaccaaaccaaacctagcctccaagagtgggaagaaattaaagcaagataggctattaagtgcagagggagagaaaatgcctccaacatgtgaggaagtaatgagagaaatcatagaattttaaggccatgatttaaggccatcatggccttaatcttccgcttcctcgctcactgactcgctgcgctcggtcgttcggctgcggcgagcggtatcagctcactcaaaggcggtaatacggttatccacagaatcaggggataacgcaggaaagaacatgtgagcaaaaggccagcaaaaggccaggaaccgtaaaaaggccgcgttgctggcgtttttccataggctccgcccccctgacgagcatcacaaaaatcgacgctcaagtcagaggtggcgaaacccgacaggactataaagataccaggcgtttccccctggaagctccctcgtgcgctctcctgttccgaccctgccgcttaccggatacctgtccgcctttctcccttcgggaagcgtggcgctttctcatagctcacgctgtaggtatctcagttcggtgtaggtcgttcgctccaagctgggctgtgtgcacgaaccccccgttcagcccgaccgctgcgccttatccggtaactatcgtcttgagtccaacccggtaagacacgacttatcgccactggcagcagccactggtaacaggattagcagagcgaggtatgtaggcggtgctacagagttcttgaagtggtggcctaactacggctacactagaagaacagtatttggtatctgcgctctgctgaagccagttaccttcggaaaaagagttggtagctcttgatccggcaaacaaaccaccgctggtagcggtggtttttttgtttgcaagcagcagattacgcgcagaaaaaaaggatctcaagaagatcctttgatcttttctacggggtctgacgctcagtggaacgaaaactcacgttaagggattttggtcatgagattatcaaaaaggatcttcacctagatccttttaaattaaaaatgaagttttaaatcaatctaaagtatatatgagtaaacttggtctgacagttaccaatgcttaatcagtgaggcacctatctcagcgatctgtctatttcgttcatccatagttgcctgactcggggggggggggcgctgaggtctgcctcgtgaagaaggtgttgctgactcataccaggcctgaatcgccccatcatccagccagaaagtgagggagccacggttgatgagagctttgttgtaggtggaccagttggtgattttgaacttttgctttgccacggaacggtctgcgttgtcgggaagatgcgtgatctgatccttcaactcagcaaaagttcgatttattcaacaaagccgccgtcccgtcaagtcagcgtaatgctctgccagtgttacaaccaattaaccaattctgattagaaaaactcatcgagcatcaaatgaaactgcaatttattcatatcaggattatcaataccatatttttgaaaaagccgtttctgtaatgaaggagaaaactcaccgaggcagttccataggatggcaagatcctggtatcggtctgcgattccgactcgtccaacatcaatacaacctattaatttcccctcgtcaaaaataaggttatcaagtgagaaatcaccatgagtgacgactgaatccggtgagaatggcaaaagcttatgcatttctttccagacttgttcaacaggccagccattacgctcgtcatcaaaatcactcgcatcaaccaaaccgttattcattcgtgattgcgcctgagcgagacgaaatacgcgatcgctgttaaaaggacaattacaaacaggaatcgaatgcaaccggcgcaggaacactgccagcgcatcaacaatattttcacctgaatcaggatattcttctaatacctggaatgctgttttcccggggatcgcagtggtgagtaaccatgcatcatcaggagtacggataaaatgcttgatggtcggaagaggcataaattccgtcagccagtttagtctgaccatctcatctgtaacatcattggcaacgctacctttgccatgtttcagaaacaactctggcgcatcgggcttcccatacaatcgatagattgtcgcacctgattgcccgacattatcgcgagcccatttatacccatataaatcagcatccatgttggaatttaatcgcggcctcgagcaagacgtttcccgttgaatatggctcataacaccccttgtattactgtttatgtaagcagacagttttattgttcatgatgatatatttttatcttgtgcaatgtaacatcagagattttgagacacaacgtggctttccccccccccccattattgaagcatttatcagggttattgtctcatgagcggatacatatttgaatgtatttagaaaaataaacaaataggggttccgcgcacatttccccgaaaagtgccacctgacgtctaagaaaccattattatcatgacattaacctataaaaataggcgtatcacgaggccctttcgtc

SEQ ID NO: 129 - DNA, 1425 bp, Artificial Sequence
  Description of Artificial Sequence: Synthetic polynucleotide
atgggatggtcatgtatcatcctttttctagtagcaactgcaaccggtgtacattcacaggtgcagctggtgcagtccggcgccgaggtgaagaagcccggcgcctccgtgaaggtgtcctgcaaggcctccggctacgagttcctgaactgccccatcaactgggtgaggcaggcccccggccagaggcccgagtggatgggctggctgaagcccaggggcggcgccgtgaactacgccaggaagttccagggcagggtgaccatgaccagggacgtgtactcctccaccgcctacatggagctgaggaggctgaggtccgacgacaccgccgtgtactactgcgccaggggcaagtactgcaccgccagggactactacaactgggacttcgagcactggggccagggcaccctggtgaccgtgtcctccccgtcgaccaagggcccatcggtcttccccctggcaccctcctccaagagcacctctgggggcacagcggccctgggctgcctggtcaaggactacttccccgaacccgtgacggtgtcgtggaactcaggcgccctgaccagcggcgtgcacaccttcccggctgtcctacagtcctcaggactctactccctcagcagcgtggtgaccgtgccctccagcagcttgggcacccagacctacatctgcaacgtgaatcacaagcccagcaacaccaaggtggacaagaaagttgagcccaaatcttgtgacaaaactcacacatgcccaccgtgcccagcacctgaactcctggggggaccgtcagtcttcctcttccccccaaaacccaaggacaccctcatgatctcccggacccctgaggtcacatgcgtggtggtggacgtgagccacgaagaccctgaggtcaagttcaactggtacgtggacggcgtggaggtgcataatgccaagacaaagccgcgggaggagcagtacaacagcacgtaccgtgtggtcagcgtcctcaccgtcctgcaccaggactggctgaatggcaaggagtacaagtgcaaggtctccaacaaagccctcccagcccccatcgagaaaaccatctccaaagccaaagggcagccccgagaaccacaggtgtacaccctgcccccatcccgggatgagctgaccaagaaccaggtcagcctgacctgcctggtcaaaggcttctatcccagcgacatcgccgtggagtgggagagcaatgggcagccggagaacaactacaagaccacgcctcccgtgctggactccgacggctccttcttcctctacagcaagctcaccgtggacaagagcaggtggcagcaggggaacgtcttctcatgctccgtgatgcatgaggctctgcacaaccactacacgcagaagagcctctccctgtctccgggtaaatga

SEQ ID NO: 130 - DNA, 5838 bp, Artificial Sequence
  Description of Artificial Sequence: Synthetic polynucleotide
tcgcgcgtttcggtgatgacggtgaaaacctctgacacatgcagctcccggagacggtcacagcttgtctgtaagcggatgccgggagcagacaagcccgtcagggcgcgtcagcgggtgttggcgggtgtcggggctggcttaactatgcggcatcagagcagattgtactgagagtgcaccatatgcggtgtgaaataccgcacagatgcgtaaggagaaaataccgcatcagattggctattggccattgcatacgttgtatccatatcataatatgtacatttatattggctcatgtccaacattaccgccatgttgacattgattattgactagttattaatagtaatcaattacggggtcattagttcatagcccatatatggagttccgcgttacataacttacggtaaatggcccgcctggctgaccgcccaacgacccccgcccattgacgtcaataatgacgtatgttcccatagtaacgccaatagggactttccattgacgtcaatgggtggagtatttacggtaaactgcccacttggcagtacatcaagtgtatcatatgccaagtacgccccctattgacgtcaatgacggtaaatggcccgcctggcattatgcccagtacatgaccttatgggactttcctacttggcagtacatctacgtattagtcatcgctattaccatggtgatgcggttttggcagtacatcaatgggcgtggatagcggtttgactcacggggatttccaagtctccaccccattgacgtcaatgggagtttgttttggcaccaaaatcaacgggactttccaaaatgtcgtaacaactccgccccattgacgcaaatgggcggtaggcgtgtacggtgggaggtctatataagcagagctcgtttagtgaaccgtcagatcgcctggagacgccatccacgctgttttgacctccatagaagacaccgggaccgatccagcctccatcggctcgcatctctccttcacgcgcccgccgccctacctgaggccgccatccacgccggttgagtcgcgttctgccgcctcccgcctgtggtgcctcctgaactgcgtccgccgtctaggtaagtttaaagctcaggtcgagaccgggcctttgtccggcgctcccttggagcctacctagactcagccggctctccacgctttgcctgaccctgcttgctcaactctagttaacggtggagggcagtgtagtctgagcagtactcgttgctgccgcgcgcgccaccagacataatagctgacagactaacagactgttcctttccatgggtcttttctgcagtcaccgtcgtcgacacgtgtgatcagatatcgcggccgctctagaccaccatgggatggtcatgtatcatcctttttctagtagcaactgcaaccggtgtacattcacaggtgcagctggtgcagtccggcgccgaggtgaagaagcccggcgcctccgtgaaggtgtcctgcaaggcctccggctacgagttcctgaactgccccatcaactgggtgaggcaggcccccggccagaggcccgagtggatgggctggctgaagcccaggggcggcgccgtgaactacgccaggaagttccagggcagggtgaccatgaccagggacgtgtactcctccaccgcctacatggagctgaggaggctgaggtccgacgacaccgccgtgtactactgcgccaggggcaagtactgcaccgccagggactactacaactgggacttcgagcactggggccagggcaccctggtgaccgtgtcctccccgtcgaccaagggcccatcggtcttccccctggcaccctcctccaagagcacctctgggggcacagcggccctgggctgcctggtcaaggactacttccccgaacccgtgacggtgtcgtggaactcaggcgccctgaccagcggcgtgcacaccttcccggctgtcctacagtcctcaggactctactccctcagcagcgtggtgaccgtgccctccagcagcttgggcacccagacctacatctgcaacgtgaatcacaagcccagcaacaccaaggtggacaagaaagttgagcccaaatcttgtgacaaaactcacacatgcccaccgtgcccagcacctgaactcctggggggaccgtcagtcttcctcttccccccaaaacccaaggacaccctcatgatctcccggacccctgaggtcacatgcgtggtggtggacgtgagccacgaagaccctgaggtcaagttcaactggtacgtggacggcgtggaggtgcataatgccaagacaaagccgcgggaggagcagtacaacagcacgtaccgtgtggtcagcgtcctcaccgtcctgcaccaggactggctgaatggcaaggagtacaagtgcaaggtctccaacaaagccctcccagcccccatcgagaaaaccatctccaaagccaaagggcagccccgagaaccacaggtgtacaccctgcccccatcccgggatgagctgaccaagaaccaggtcagcctgacctgcctggtcaaaggcttctatcccagcgacatcgccgtggagtgggagagcaatgggcagccggagaacaactacaagaccacgcctcccgtgctggactccgacggctccttcttcctctacagcaagctcaccgtggacaagagcaggtggcagcaggggaacgtcttctcatgctccgtgatgcatgaggctctgcacaaccactacacgcagaagagcctctccctgtctccgggtaaatgatgaggatccagatctgctgtgccttctagttgccagccatctgttgtttgcccctcccccgtgccttccttgaccctggaaggtgccactcccactgtcctttcctaataaaatgaggaaattgcatcgcattgtctgagtaggtgtcattctattctggggggtggggtggggcaggacagcaagggggaggattgggaagacaatagcaggcatgctggggatgcggtgggctctatgggtacccaggtgctgaagaattgacccggttcctcctgggccagaaagaagcaggcacatccccttctctgtgacacaccctgtccacgcccctggttcttagttccagccccactcataggacactcatagctcaggagggctccgccttcaatcccacccgctaaagtacttggagcggtctctccctccctcatcagcccaccaaaccaaacctagcctccaagagtgggaagaaattaaagcaagataggctattaagtgcagagggagagaaaatgcctccaacatgtgaggaagtaatgagagaaatcatagaattttaaggccatgatttaaggccatcatggccttaatcttccgcttcctcgctcactgactcgctgcgctcggtcgttcggctgcggcgagcggtatcagctcactcaaaggcggtaatacggttatccacagaatcaggggataacgcaggaaagaacatgtgagcaaaaggccagcaaaaggccaggaaccgtaaaaaggccgcgttgctggcgtttttccataggctccgcccccctgacgagcatcacaaaaatcgacgctcaagtcagaggtggcgaaacccgacaggactataaagataccaggcgtttccccctggaagctccctcgtgcgctctcctgttccgaccctgccgcttaccggatacctgtccgcctttctcccttcgggaagcgtggcgctttctcatagctcacgctgtaggtatctcagttcggtgtaggtcgttcgctccaagctgggctgtgtgcacgaaccccccgttcagcccgaccgctgcgccttatccggtaactatcgtcttgagtccaacccggtaagacacgacttatcgccactggcagcagccactggtaacaggattagcagagcgaggtatgtaggcggtgctacagagttcttgaagtggtggcctaactacggctacactagaagaacagtatttggtatctgcgctctgctgaagccagttaccttcggaaaaagagttggtagctcttgatccggcaaacaaaccaccgctggtagcggtggtttttttgtttgcaagcagcagattacgcgcagaaaaaaaggatctcaagaagatcctttgatcttttctacggggtctgacgctcagtggaacgaaaactcacgttaagggattttggtcatgagattatcaaaaaggatcttcacctagatccttttaaattaaaaatgaagttttaaatcaatctaaagtatatatgagtaaacttggtctgacagttaccaatgcttaatcagtgaggcacctatctcagcgatctgtctatttcgttcatccatagttgcctgactcggggggggggggcgctgaggtctgcctcgtgaagaaggtgttgctgactcataccaggcctgaatcgccccatcatccagccagaaagtgagggagccacggttgatgagagctttgttgtaggtggaccagttggtgattttgaacttttgctttgccacggaacggtctgcgttgtcgggaagatgcgtgatctgatccttcaactcagcaaaagttcgatttattcaacaaagccgccgtcccgtcaagtcagcgtaatgctctgccagtgttacaaccaattaaccaattctgattagaaaaactcatcgagcatcaaatgaaactgcaatttattcatatcaggattatcaataccatatttttgaaaaagccgtttctgtaatgaaggagaaaactcaccgaggcagttccataggatggcaagatcctggtatcggtctgcgattccgactcgtccaacatcaatacaacctattaatttcccctcgtcaaaaataaggttatcaagtgagaaatcaccatgagtgacgactgaatccggtgagaatggcaaaagcttatgcatttctttccagacttgttcaacaggccagccattacgctcgtcatcaaaatcactcgcatcaaccaaaccgttattcattcgtgattgcgcctgagcgagacgaaatacgcgatcgctgttaaaaggacaattacaaacaggaatcgaatgcaaccggcgcaggaacactgccagcgcatcaacaatattttcacctgaatcaggatattcttctaatacctggaatgctgttttcccggggatcgcagtggtgagtaaccatgcatcatcaggagtacggataaaatgcttgatggtcggaagaggcataaattccgtcagccagtttagtctgaccatctcatctgtaacatcattggcaacgctacctttgccatgtttcagaaacaactctggcgcatcgggcttcccatacaatcgatagattgtcgcacctgattgcccgacattatcgcgagcccatttatacccatataaatcagcatccatgttggaatttaatcgcggcctcgagcaagacgtttcccgttgaatatggctcataacaccccttgtattactgtttatgtaagcagacagttttattgttcatgatgatatatttttatcttgtgcaatgtaacatcagagattttgagacacaacgtggctttccccccccccccattattgaagcatttatcagggttattgtctcatgagcggatacatatttgaatgtatttagaaaaataaacaaataggggttccgcgcacatttccccgaaaagtgccacctgacgtctaagaaaccattattatcatgacattaacctataaaaataggcgtatcacgaggccctttcgtc

SEQ ID NO: 131 - DNA, 1425 bp, Artificial Sequence
  Description of Artificial Sequence: Synthetic polynucleotide
atgggatggtcatgtatcatcctttttctagtagcaactgcaaccggtgtacattcacaggtgcagctggtgcagtccggcgccgaggtgaagaagcccggcgcctccgtgaaggtgtcctgcaaggcctccggctacgagttcatcaactgccccatcaactgggtgaggcaggcccccggccagggcctggagtggatgggctggatgaagcccaggggcggcgccgtgtcctacgccaggcagctgcagggcagggtgaccatgaccagggacatgtacatctccaccgcctacatggagctgtccaggctgaggtccgacgacaccgccgtgtactactgcgccaggggcaagtactgcaccgccagggactactacaactgggacttcgagcactggggccagggcaccctggtgaccgtgtcctccccgtcgaccaagggcccatcggtcttccccctggcaccctcctccaagagcacctctgggggcacagcggccctgggctgcctggtcaaggactacttccccgaacccgtgacggtgtcgtggaactcaggcgccctgaccagcggcgtgcacaccttcccggctgtcctacagtcctcaggactctactccctcagcagcgtggtgaccgtgccctccagcagcttgggcacccagacctacatctgcaacgtgaatcacaagcccagcaacaccaaggtggacaagaaagttgagcccaaatcttgtgacaaaactcacacatgcccaccgtgcccagcacctgaactcctggggggaccgtcagtcttcctcttccccccaaaacccaaggacaccctcatgatctcccggacccctgaggtcacatgcgtggtggtggacgtgagccacgaagaccctgaggtcaagttcaactggtacgtggacggcgtggaggtgcataatgccaagacaaagccgcgggaggagcagtacaacagcacgtaccgtgtggtcagcgtcctcaccgtcctgcaccaggactggctgaatggcaaggagtacaagtgcaaggtctccaacaaagccctcccagcccccatcgagaaaaccatctccaaagccaaagggcagccccgagaaccacaggtgtacaccctgcccccatcccgggatgagctgaccaagaaccaggtcagcctgacctgcctggtcaaaggcttctatcccagcgacatcgccgtggagtgggagagcaatgggcagccggagaacaactacaagaccacgcctcccgtgctggactccgacggctccttcttcctctacagcaagctcaccgtggacaagagcaggtggcagcaggggaacgtcttctcatgctccgtgatgcatgaggctctgcacaaccactacacgcagaagagcctctccctgtctccgggtaaatga

SEQ ID NO: 132 - DNA, 5837 bp, Artificial Sequence
  Description of Artificial Sequence: Synthetic polynucleotide
tcgcgcgtttcggtgatgacggtgaaaacctctgacacatgcagctcccggagacggtcacagcttgtctgtaagcggatgccgggagcagacaagcccgtcagggcgcgtcagcgggtgttggcgggtgtcggggctggcttaactatgcggcatcagagcagattgtactgagagtgcaccatatgcggtgtgaaataccgcacagatgcgtaaggagaaaataccgcatcagattggctattggccattgcatacgttgtatccatatcataatatgtacatttatattggctcatgtccaacattaccgccatgttgacattgattattgactagttattaatagtaatcaattacggggtcattagttcatagcccatatatggagttccgcgttacataacttacggtaaatggcccgcctggctgaccgcccaacgacccccgcccattgacgtcaataatgacgtatgttcccatagtaacgccaatagggactttccattgacgtcaatgggtggagtatttacggtaaactgcccacttggcagtacatcaagtgtatcatatgccaagtacgccccctattgacgtcaatgacggtaaatggcccgcctggcattatgcccagtacatgaccttatgggactttcctacttggcagtacatctacgtattagtcatcgctattaccatggtgatgcggttttggcagtacatcaatgggcgtggatagcggtttgactcacggggatttccaagtctccaccccattgacgtcaatgggagtttgttttggcaccaaaatcaacgggactttccaaaatgtcgtaacaactccgccccattgacgcaaatgggcggtaggcgtgtacggtgggaggtctatataagcagagctcgtttagtgaaccgtcagatcgcctggagacgccatccacgctgttttgacctccatagaagacaccgggaccgatccagcctccatcggctcgcatctctccttcacgcgcccgccgccctacctgaggccgccatccacgccggttgagtcgcgttctgccgcctcccgcctgtggtgcctcctgaactgcgtccgccgtctaggtaagtttaaagctcaggtcgagaccgggcctttgtccggcgctcccttggagcctacctagactcagccggctctccacgctttgcctgaccctgcttgctcaactctagttaacggtggagggcagtgtagtctgagcagtactcgttgctgccgcgcgcgccaccagacataatagctgacagactaacagactgttcctttccatgggtcttttctgcagtcaccgtcgtcgacacgtgtgatcagatatcgcggccgctctagaccaccatgggatggtcatgtatcatcctttttctagtagcaactgcaaccggtgtacattcacaggtgcagctggtgcagtccggcgccgaggtgaagaagcccggcgcctccgtgaaggtgtcctgcaaggcctccggctacgagttcatcaactgccccatcaactgggtgaggcaggcccccggccagggcctggagtggatgggctggatgaagcccaggggcggcgccgtgtcctacgccaggcagctgcagggcagggtgaccatgaccagggacatgtacatctccaccgcctacatggagctgtccaggctgaggtccgacgacaccgccgtgtactactgcgccaggggcaagtactgcaccgccagggactactacaactgggacttcgagcactggggccagggcaccctggtgaccgtgtcctccccgtcgaccaagggcccatcggtcttccccctggcaccctcctccaagagcacctctgggggcacagcggccctgggctgcctggtcaaggactacttccccgaacccgtgacggtgtcgtggaactcaggcgccctgaccagcggcgtgcacaccttcccggctgtcctacagtcctcaggactctactccctcagcagcgtggtgaccgtgccctccagcagcttgggcacccagacctacatctgcaacgtgaatcacaagcccagcaacaccaaggtggacaagaaagttgagcccaaatcttgtgacaaaactcacacatgcccaccgtgcccagcacctgaactcctggggggaccgtcagtcttcctcttccccccaaaacccaaggacaccctcatgatctcccggacccctgaggtcacatgcgtggtggtggacgtgagccacgaagaccctgaggtcaagttcaactggtacgtggacggcgtggaggtgcataatgccaagacaaagccgcgggaggagcagtacaacagcacgtaccgtgtggtcagcgtcctcaccgtcctgcaccaggactggctgaatggcaaggagtacaagtgcaaggtctccaacaaagccctcccagcccccatcgagaaaaccatctccaaagccaaagggcagccccgagaaccacaggtgtacaccctgcccccatcccgggatgagctgaccaagaaccaggtcagcctgacctgcctggtcaaaggcttctatcccagcgacatcgccgtggagtgggagagcaatgggcagccggagaacaactacaagaccacgcctcccgtgctggactccgacggctccttcttcctctacagcaagctcaccgtggacaagagcaggtggcagcaggggaacgtcttctcatgctccgtgatgcatgaggctctgcacaaccactacacgcagaagagcctctccctgtctccgggtaaatgataggatccagatctgctgtgccttctagttgccagccatctgttgtttgcccctcccccgtgccttccttgaccctggaaggtgccactcccactgtcctttcctaataaaatgaggaaattgcatcgcattgtctgagtaggtgtcattctattctggggggtggggtggggcaggacagcaagggggaggattgggaagacaatagcaggcatgctggggatgcggtgggctctatgggtacccaggtgctgaagaattgacccggttcctcctgggccagaaagaagcaggcacatccccttctctgtgacacaccctgtccacgcccctggttcttagttccagccccactcataggacactcatagctcaggagggctccgccttcaatcccacccgctaaagtacttggagcggtctctccctccctcatcagcccaccaaaccaaacctagcctccaagagtgggaagaaattaaagcaagataggctattaagtgcagagggagagaaaatgcctccaacatgtgaggaagtaatgagagaaatcatagaattttaaggccatgatttaaggccatcatggccttaatcttccgcttcctcgctcactgactcgctgcgctcggtcgttcggctgcggcgagcggtatcagctcactcaaaggcggtaatacggttatccacagaatcaggggataacgcaggaaagaacatgtgagcaaaaggccagcaaaaggccaggaaccgtaaaaaggccgcgttgctggcgtttttccataggctccgcccccctgacgagcatcacaaaaatcgacgctcaagtcagaggtggcgaaacccgacaggactataaagataccaggcgtttccccctggaagctccctcgtgcgctctcctgttccgaccctgccgcttaccggatacctgtccgcctttctcccttcgggaagcgtggcgctttctcatagctcacgctgtaggtatctcagttcggtgtaggtcgttcgctccaagctgggctgtgtgcacgaaccccccgttcagcccgaccgctgcgccttatccggtaactatcgtcttgagtccaacccggtaagacacgacttatcgccactggcagcagccactggtaacaggattagcagagcgaggtatgtaggcggtgctacagagttcttgaagtggtggcctaactacggctacactagaagaacagtatttggtatctgcgctctgctgaagccagttaccttcggaaaaagagttggtagctcttgatccggcaaacaaaccaccgctggtagcggtggtttttttgtttgcaagcagcagattacgcgcagaaaaaaaggatctcaagaagatcctttgatcttttctacggggtctgacgctcagtggaacgaaaactcacgttaagggattttggtcatgagattatcaaaaaggatcttcacctagatccttttaaattaaaaatgaagttttaaatcaatctaaagtatatatgagtaaacttggtctgacagttaccaatgcttaatcagtgaggcacctatctcagcgatctgtctatttcgttcatccatagttgcctgactcggggggggggggcgctgaggtctgcctcgtgaagaaggtgttgctgactcataccaggcctgaatcgccccatcatccagccagaaagtgagggagccacggttgatgagagctttgttgtaggtggaccagttggtgattttgaacttttgctttgccacggaacggtctgcgttgtcgggaagatgcgtgatctgatccttcaactcagcaaaagttcgatttattcaacaaagccgccgtcccgtcaagtcagcgtaatgctctgccagtgttacaaccaattaaccaattctgattagaaaaactcatcgagcatcaaatgaaactgcaatttattcatatcaggattatcaataccatatttttgaaaaagccgtttctgtaatgaaggagaaaactcaccgaggcagttccataggatggcaagatcctggtatcggtctgcgattccgactcgtccaacatcaatacaacctattaatttcccctcgtcaaaaataaggttatcaagtgagaaatcaccatgagtgacgactgaatccggtgagaatggcaaaagcttatgcatttctttccagacttgttcaacaggccagccattacgctcgtcatcaaaatcactcgcatcaaccaaaccgttattcattcgtgattgcgcctgagcgagacgaaatacgcgatcgctgttaaaaggacaattacaaacaggaatcgaatgcaaccggcgcaggaacactgccagcgcatcaacaatattttcacctgaatcaggatattcttctaatacctggaatgctgttttcccggggatcgcagtggtgagtaaccatgcatcatcaggagtacggataaaatgcttgatggtcggaagaggcataaattccgtcagccagtttagtctgaccatctcatctgtaacatcattggcaacgctacctttgccatgtttcagaaacaactctggcgcatcgggcttcccatacaatcgatagattgtcgcacctgattgcccgacattatcgcgagcccatttatacccatataaatcagcatccatgttggaatttaatcgcggcctcgagcaagacgtttcccgttgaatatggctcataacaccccttgtattactgtttatgtaagcagacagttttattgttcatgatgatatatttttatcttgtgcaatgtaacatcagagattttgagacacaacgtggctttccccccccccccattattgaagcatttatcagggttattgtctcatgagcggatacatatttgaatgtatttagaaaaataaacaaataggggttccgcgcacatttccccgaaaagtgccacctgacgtctaagaaaccattattatcatgacattaacctataaaaataggcgtatcacgaggccctttcgtc

SEQ ID NO: 133 - DNA, 1425 bp, Artificial Sequence
  Description of Artificial Sequence: Synthetic polynucleotide
atgggatggtcatgtatcatcctttttctagtagcaactgcaaccggtgtacattcacaggtgcagctggtgcagtccggcgccgaggtgaagaagcccggcgcctccgtgaaggtgtcctgcaaggcctccggctacgagttcatcaactgccccatcaactgggtgaggcaggcccccggccagaggcccgagtggatgggctggatgaagcccaggggcggcgccgtgtcctacgccaggcagctgcagggcagggtgaccatgaccagggacatgtactcctccaccgcctacatggagctgaggaggctgaggtccgacgacaccgccgtgtactactgcgccaggggcaagtactgcaccgccagggactactacaactgggacttcgagcactggggccagggcaccctggtgaccgtgtcctccccgtcgaccaagggcccatcggtcttccccctggcaccctcctccaagagcacctctgggggcacagcggccctgggctgcctggtcaaggactacttccccgaacccgtgacggtgtcgtggaactcaggcgccctgaccagcggcgtgcacaccttcccggctgtcctacagtcctcaggactctactccctcagcagcgtggtgaccgtgccctccagcagcttgggcacccagacctacatctgcaacgtgaatcacaagcccagcaacaccaaggtggacaagaaagttgagcccaaatcttgtgacaaaactcacacatgcccaccgtgcccagcacctgaactcctggggggaccgtcagtcttcctcttccccccaaaacccaaggacaccctcatgatctcccggacccctgaggtcacatgcgtggtggtggacgtgagccacgaagaccctgaggtcaagttcaactggtacgtggacggcgtggaggtgcataatgccaagacaaagccgcgggaggagcagtacaacagcacgtaccgtgtggtcagcgtcctcaccgtcctgcaccaggactggctgaatggcaaggagtacaagtgcaaggtctccaacaaagccctcccagcccccatcgagaaaaccatctccaaagccaaagggcagccccgagaaccacaggtgtacaccctgcccccatcccgggatgagctgaccaagaaccaggtcagcctgacctgcctggtcaaaggcttctatcccagcgacatcgccgtggagtgggagagcaatgggcagccggagaacaactacaagaccacgcctcccgtgctggactccgacggctccttcttcctctacagcaagctcaccgtggacaagagcaggtggcagcaggggaacgtcttctcatgctccgtgatgcatgaggctctgcacaaccactacacgcagaagagcctctccctgtctccgggtaaatga

SEQ ID NO: 134 - DNA, 5838 bp, Artificial Sequence
  Description of Artificial Sequence: Synthetic polynucleotide
tcgcgcgtttcggtgatgacggtgaaaacctctgacacatgcagctcccggagacggtcacagcttgtctgtaagcggatgccgggagcagacaagcccgtcagggcgcgtcagcgggtgttggcgggtgtcggggctggcttaactatgcggcatcagagcagattgtactgagagtgcaccatatgcggtgtgaaataccgcacagatgcgtaaggagaaaataccgcatcagattggctattggccattgcatacgttgtatccatatcataatatgtacatttatattggctcatgtccaacattaccgccatgttgacattgattattgactagttattaatagtaatcaattacggggtcattagttcatagcccatatatggagttccgcgttacataacttacggtaaatggcccgcctggctgaccgcccaacgacccccgcccattgacgtcaataatgacgtatgttcccatagtaacgccaatagggactttccattgacgtcaatgggtggagtatttacggtaaactgcccacttggcagtacatcaagtgtatcatatgccaagtacgccccctattgacgtcaatgacggtaaatggcccgcctggcattatgcccagtacatgaccttatgggactttcctacttggcagtacatctacgtattagtcatcgctattaccatggtgatgcggttttggcagtacatcaatgggcgtggatagcggtttgactcacggggatttccaagtctccaccccattgacgtcaatgggagtttgttttggcaccaaaatcaacgggactttccaaaatgtcgtaacaactccgccccattgacgcaaatgggcggtaggcgtgtacggtgggaggtctatataagcagagctcgtttagtgaaccgtcagatcgcctggagacgccatccacgctgttttgacctccatagaagacaccgggaccgatccagcctccatcggctcgcatctctccttcacgcgcccgccgccctacctgaggccgccatccacgccggttgagtcgcgttctgccgcctcccgcctgtggtgcctcctgaactgcgtccgccgtctaggtaagtttaaagctcaggtcgagaccgggcctttgtccggcgctcccttggagcctacctagactcagccggctctccacgctttgcctgaccctgcttgctcaactctagttaacggtggagggcagtgtagtctgagcagtactcgttgctgccgcgcgcgccaccagacataatagctgacagactaacagactgttcctttccatgggtcttttctgcagtcaccgtcgtcgacacgtgtgatcagatatcgcggccgctctagaccaccatgggatggtcatgtatcatcctttttctagtagcaactgcaaccggtgtacattcacaggtgcagctggtgcagtccggcgccgaggtgaagaagcccggcgcctccgtgaaggtgtcctgcaaggcctccggctacgagttcatcaactgccccatcaactgggtgaggcaggcccccggccagaggcccgagtggatgggctggatgaagcccaggggcggcgccgtgtcctacgccaggcagctgcagggcagggtgaccatgaccagggacatgtactcctccaccgcctacatggagctgaggaggctgaggtccgacgacaccgccgtgtactactgcgccaggggcaagtactgcaccgccagggactactacaactgggacttcgagcactggggccagggcaccctggtgaccgtgtcctccccgtcgaccaagggcccatcggtcttccccctggcaccctcctccaagagcacctctgggggcacagcggccctgggctgcctggtcaaggactacttccccgaacccgtgacggtgtcgtggaactcaggcgccctgaccagcggcgtgcacaccttcccggctgtcctacagtcctcaggactctactccctcagcagcgtggtgaccgtgccctccagcagcttgggcacccagacctacatctgcaacgtgaatcacaagcccagcaacaccaaggtggacaagaaagttgagcccaaatcttgtgacaaaactcacacatgcccaccgtgcccagcacctgaactcctggggggaccgtcagtcttcctcttccccccaaaacccaaggacaccctcatgatctcccggacccctgaggtcacatgcgtggtggtggacgtgagccacgaagaccctgaggtcaagttcaactggtacgtggacggcgtggaggtgcataatgccaagacaaagccgcgggaggagcagtacaacagcacgtaccgtgtggtcagcgtcctcaccgtcctgcaccaggactggctgaatggcaaggagtacaagtgcaaggtctccaacaaagccctcccagcccccatcgagaaaaccatctccaaagccaaagggcagccccgagaaccacaggtgtacaccctgcccccatcccgggatgagctgaccaagaaccaggtcagcctgacctgcctggtcaaaggcttctatcccagcgacatcgccgtggagtgggagagcaatgggcagccggagaacaactacaagaccacgcctcccgtgctggactccgacggctccttcttcctctacagcaagctcaccgtggacaagagcaggtggcagcaggggaacgtcttctcatgctccgtgatgcatgaggctctgcacaaccactacacgcagaagagcctctccctgtctccgggtaaatgatgaggatccagatctgctgtgccttctagttgccagccatctgttgtttgcccctcccccgtgccttccttgaccctggaaggtgccactcccactgtcctttcctaataaaatgaggaaattgcatcgcattgtctgagtaggtgtcattctattctggggggtggggtggggcaggacagcaagggggaggattgggaagacaatagcaggcatgctggggatgcggtgggctctatgggtacccaggtgctgaagaattgacccggttcctcctgggccagaaagaagcaggcacatccccttctctgtgacacaccctgtccacgcccctggttcttagttccagccccactcataggacactcatagctcaggagggctccgccttcaatcccacccgctaaagtacttggagcggtctctccctccctcatcagcccaccaaaccaaacctagcctccaagagtgggaagaaattaaagcaagataggctattaagtgcagagggagagaaaatgcctccaacatgtgaggaagtaatgagagaaatcatagaattttaaggccatgatttaaggccatcatggccttaatcttccgcttcctcgctcactgactcgctgcgctcggtcgttcggctgcggcgagcggtatcagctcactcaaaggcggtaatacggttatccacagaatcaggggataacgcaggaaagaacatgtgagcaaaaggccagcaaaaggccaggaaccgtaaaaaggccgcgttgctggcgtttttccataggctccgcccccctgacgagcatcacaaaaatcgacgctcaagtcagaggtggcgaaacccgacaggactataaagataccaggcgtttccccctggaagctccctcgtgcgctctcctgttccgaccctgccgcttaccggatacctgtccgcctttctcccttcgggaagcgtggcgctttctcatagctcacgctgtaggtatctcagttcggtgtaggtcgttcgctccaagctgggctgtgtgcacgaaccccccgttcagcccgaccgctgcgccttatccggtaactatcgtcttgagtccaacccggtaagacacgacttatcgccactggcagcagccactggtaacaggattagcagagcgaggtatgtaggcggtgctacagagttcttgaagtggtggcctaactacggctacactagaagaacagtatttggtatctgcgctctgctgaagccagttaccttcggaaaaagagttggtagctcttgatccggcaaacaaaccaccgctggtagcggtggtttttttgtttgcaagcagcagattacgcgcagaaaaaaaggatctcaagaagatcctttgatcttttctacggggtctgacgctcagtggaacgaaaactcacgttaagggattttggtcatgagattatcaaaaaggatcttcacctagatccttttaaattaaaaatgaagttttaaatcaatctaaagtatatatgagtaaacttggtctgacagttaccaatgcttaatcagtgaggcacctatctcagcgatctgtctatttcgttcatccatagttgcctgactcggggggggggggcgctgaggtctgcctcgtgaagaaggtgttgctgactcataccaggcctgaatcgccccatcatccagccagaaagtgagggagccacggttgatgagagctttgttgtaggtggaccagttggtgattttgaacttttgctttgccacggaacggtctgcgttgtcgggaagatgcgtgatctgatccttcaactcagcaaaagttcgatttattcaacaaagccgccgtcccgtcaagtcagcgtaatgctctgccagtgttacaaccaattaaccaattctgattagaaaaactcatcgagcatcaaatgaaactgcaatttattcatatcaggattatcaataccatatttttgaaaaagccgtttctgtaatgaaggagaaaactcaccgaggcagttccataggatggcaagatcctggtatcggtctgcgattccgactcgtccaacatcaatacaacctattaatttcccctcgtcaaaaataaggttatcaagtgagaaatcaccatgagtgacgactgaatccggtgagaatggcaaaagcttatgcatttctttccagacttgttcaacaggccagccattacgctcgtcatcaaaatcactcgcatcaaccaaaccgttattcattcgtgattgcgcctgagcgagacgaaatacgcgatcgctgttaaaaggacaattacaaacaggaatcgaatgcaaccggcgcaggaacactgccagcgcatcaacaatattttcacctgaatcaggatattcttctaatacctggaatgctgttttcccggggatcgcagtggtgagtaaccatgcatcatcaggagtacggataaaatgcttgatggtcggaagaggcataaattccgtcagccagtttagtctgaccatctcatctgtaacatcattggcaacgctacctttgccatgtttcagaaacaactctggcgcatcgggcttcccatacaatcgatagattgtcgcacctgattgcccgacattatcgcgagcccatttatacccatataaatcagcatccatgttggaatttaatcgcggcctcgagcaagacgtttcccgttgaatatggctcataacaccccttgtattactgtttatgtaagcagacagttttattgttcatgatgatatatttttatcttgtgcaatgtaacatcagagattttgagacacaacgtggctttccccccccccccattattgaagcatttatcagggttattgtctcatgagcggatacatatttgaatgtatttagaaaaataaacaaataggggttccgcgcacatttccccgaaaagtgccacctgacgtctaagaaaccattattatcatgacattaacctataaaaataggcgtatcacgaggccctttcgtc

SEQ ID NO: 135 - DNA, 690 bp, Artificial Sequence
  Description of Artificial Sequence: Synthetic polynucleotide
atgggatggtcatgtatcatcctttttctagtagcaactgcaaccggtgtacattcagagatcgtgctgacccagtcccccgccaccctgtccctgtcccccggcgagagggccaccctgtcctgcaggacctcccagtacggctccctggcctggtaccagcagaagcccggccaggcccccaggctggtgatctactccggctccaccagggccgccggcatccccgccaggttctccggctccaggtccggccccgactacaccctgaccatctcctccctggagtccggcgacttcgccgtgtactactgccagcagtacgagttcttcggccccggcaccaaggtgcaggtggacatcaagcgtacggtggctgcaccatctgtcttcatcttcccgccatctgatgagcagttgaaatctggaactgcctctgttgtgtgcctgctgaataacttctaccccagagaagccaaagtgcagtggaaggtggacaacgccctgcagagcggaaacagccaggaaagcgtgacagagcaggattccaaggattccacatacagcctgagcagcacactgacactgtccaaggccgactacgagaagcacaaggtgtacgcctgcgaagtgacacaccagggactgtcctcccctgtgacaaagagcttcaacagaggagaatgctga

SEQ ID NO: 136 - DNA, 5102 bp, Artificial Sequence
  Description of Artificial Sequence: Synthetic polynucleotide
tcgcgcgtttcggtgatgacggtgaaaacctctgacacatgcagctcccggagacggtcacagcttgtctgtaagcggatgccgggagcagacaagcccgtcagggcgcgtcagcgggtgttggcgggtgtcggggctggcttaactatgcggcatcagagcagattgtactgagagtgcaccatatgcggtgtgaaataccgcacagatgcgtaaggagaaaataccgcatcagattggctattggccattgcatacgttgtatccatatcataatatgtacatttatattggctcatgtccaacattaccgccatgttgacattgattattgactagttattaatagtaatcaattacggggtcattagttcatagcccatatatggagttccgcgttacataacttacggtaaatggcccgcctggctgaccgcccaacgacccccgcccattgacgtcaataatgacgtatgttcccatagtaacgccaatagggactttccattgacgtcaatgggtggagtatttacggtaaactgcccacttggcagtacatcaagtgtatcatatgccaagtacgccccctattgacgtcaatgacggtaaatggcccgcctggcattatgcccagtacatgaccttatgggactttcctacttggcagtacatctacgtattagtcatcgctattaccatggtgatgcggttttggcagtacatcaatgggcgtggatagcggtttgactcacggggatttccaagtctccaccccattgacgtcaatgggagtttgttttggcaccaaaatcaacgggactttccaaaatgtcgtaacaactccgccccattgacgcaaatgggcggtaggcgtgtacggtgggaggtctatataagcagagctcgtttagtgaaccgtcagatcgcctggagacgccatccacgctgttttgacctccatagaagacaccgggaccgatccagcctccatcggctcgcatctctccttcacgcgcccgccgccctacctgaggccgccatccacgccggttgagtcgcgttctgccgcctcccgcctgtggtgcctcctgaactgcgtccgccgtctaggtaagtttaaagctcaggtcgagaccgggcctttgtccggcgctcccttggagcctacctagactcagccggctctccacgctttgcctgaccctgcttgctcaactctagttaacggtggagggcagtgtagtctgagcagtactcgttgctgccgcgcgcgccaccagacataatagctgacagactaacagactgttcctttccatgggtcttttctgcagtcaccgtcgtcgacacgtgtgatcagatatcgcggccgctctagaccaccatgggatggtcatgtatcatcctttttctagtagcaactgcaaccggtgtacattcagagatcgtgctgacccagtcccccgccaccctgtccctgtcccccggcgagagggccaccctgtcctgcaggacctcccagtacggctccctggcctggtaccagcagaagcccggccaggcccccaggctggtgatctactccggctccaccagggccgccggcatccccgccaggttctccggctccaggtccggccccgactacaccctgaccatctcctccctggagtccggcgacttcgccgtgtactactgccagcagtacgagttcttcggccccggcaccaaggtgcaggtggacatcaagcgtacggtggctgcaccatctgtcttcatcttcccgccatctgatgagcagttgaaatctggaactgcctctgttgtgtgcctgctgaataacttctaccccagagaagccaaagtgcagtggaaggtggacaacgccctgcagagcggaaacagccaggaaagcgtgacagagcaggattccaaggattccacatacagcctgagcagcacactgacactgtccaaggccgactacgagaagcacaaggtgtacgcctgcgaagtgacacaccagggactgtcctcccctgtgacaaagagcttcaacagaggagaatgctgataggatccagatctgctgtgccttctagttgccagccatctgttgtttgcccctcccccgtgccttccttgaccctggaaggtgccactcccactgtcctttcctaataaaatgaggaaattgcatcgcattgtctgagtaggtgtcattctattctggggggtggggtggggcaggacagcaagggggaggattgggaagacaatagcaggcatgctggggatgcggtgggctctatgggtacccaggtgctgaagaattgacccggttcctcctgggccagaaagaagcaggcacatccccttctctgtgacacaccctgtccacgcccctggttcttagttccagccccactcataggacactcatagctcaggagggctccgccttcaatcccacccgctaaagtacttggagcggtctctccctccctcatcagcccaccaaaccaaacctagcctccaagagtgggaagaaattaaagcaagataggctattaagtgcagagggagagaaaatgcctccaacatgtgaggaagtaatgagagaaatcatagaattttaaggccatgatttaaggccatcatggccttaatcttccgcttcctcgctcactgactcgctgcgctcggtcgttcggctgcggcgagcggtatcagctcactcaaaggcggtaatacggttatccacagaatcaggggataacgcaggaaagaacatgtgagcaaaaggccagcaaaaggccaggaaccgtaaaaaggccgcgttgctggcgtttttccataggctccgcccccctgacgagcatcacaaaaatcgacgctcaagtcagaggtggcgaaacccgacaggactataaagataccaggcgtttccccctggaagctccctcgtgcgctctcctgttccgaccctgccgcttaccggatacctgtccgcctttctcccttcgggaagcgtggcgctttctcatagctcacgctgtaggtatctcagttcggtgtaggtcgttcgctccaagctgggctgtgtgcacgaaccccccgttcagcccgaccgctgcgccttatccggtaactatcgtcttgagtccaacccggtaagacacgacttatcgccactggcagcagccactggtaacaggattagcagagcgaggtatgtaggcggtgctacagagttcttgaagtggtggcctaactacggctacactagaagaacagtatttggtatctgcgctctgctgaagccagttaccttcggaaaaagagttggtagctcttgatccggcaaacaaaccaccgctggtagcggtggtttttttgtttgcaagcagcagattacgcgcagaaaaaaaggatctcaagaagatcctttgatcttttctacggggtctgacgctcagtggaacgaaaactcacgttaagggattttggtcatgagattatcaaaaaggatcttcacctagatccttttaaattaaaaatgaagttttaaatcaatctaaagtatatatgagtaaacttggtctgacagttaccaatgcttaatcagtgaggcacctatctcagcgatctgtctatttcgttcatccatagttgcctgactcggggggggggggcgctgaggtctgcctcgtgaagaaggtgttgctgactcataccaggcctgaatcgccccatcatccagccagaaagtgagggagccacggttgatgagagctttgttgtaggtggaccagttggtgattttgaacttttgctttgccacggaacggtctgcgttgtcgggaagatgcgtgatctgatccttcaactcagcaaaagttcgatttattcaacaaagccgccgtcccgtcaagtcagcgtaatgctctgccagtgttacaaccaattaaccaattctgattagaaaaactcatcgagcatcaaatgaaactgcaatttattcatatcaggattatcaataccatatttttgaaaaagccgtttctgtaatgaaggagaaaactcaccgaggcagttccataggatggcaagatcctggtatcggtctgcgattccgactcgtccaacatcaatacaacctattaatttcccctcgtcaaaaataaggttatcaagtgagaaatcaccatgagtgacgactgaatccggtgagaatggcaaaagcttatgcatttctttccagacttgttcaacaggccagccattacgctcgtcatcaaaatcactcgcatcaaccaaaccgttattcattcgtgattgcgcctgagcgagacgaaatacgcgatcgctgttaaaaggacaattacaaacaggaatcgaatgcaaccggcgcaggaacactgccagcgcatcaacaatattttcacctgaatcaggatattcttctaatacctggaatgctgttttcccggggatcgcagtggtgagtaaccatgcatcatcaggagtacggataaaatgcttgatggtcggaagaggcataaattccgtcagccagtttagtctgaccatctcatctgtaacatcattggcaacgctacctttgccatgtttcagaaacaactctggcgcatcgggcttcccatacaatcgatagattgtcgcacctgattgcccgacattatcgcgagcccatttatacccatataaatcagcatccatgttggaatttaatcgcggcctcgagcaagacgtttcccgttgaatatggctcataacaccccttgtattactgtttatgtaagcagacagttttattgttcatgatgatatatttttatcttgtgcaatgtaacatcagagattttgagacacaacgtggctttccccccccccccattattgaagcatttatcagggttattgtctcatgagcggatacatatttgaatgtatttagaaaaataaacaaataggggttccgcgcacatttccccgaaaagtgccacctgacgtctaagaaaccattattatcatgacattaacctataaaaataggcgtatcacgaggccctttcgtc

SEQ ID NO: 137 - DNA, 690 bp, Artificial Sequence
  Description of Artificial Sequence: Synthetic polynucleotide
atgggatggtcatgtatcatcctttttctagtagcaactgcaaccggtgtacattcagagatcgtgctgacccagtcccccgccaccctgtccctgtcccccggcgagagggccaccatctcctgcaggacctcccagtacggctccctggcctggtaccagcagaagcccggccaggcccccaggctggtgatctactccggctccaccagggccgccggcatccccgccaggttctccggctccaggtccggccccgactacaccctgaccatctcctccctggagtccggcgacttcggcgtgtactactgccagcagtacgagttcttcggccccggcaccaaggtgcaggtggacatcaagcgtacggtggctgcaccatctgtcttcatcttcccgccatctgatgagcagttgaaatctggaactgcctctgttgtgtgcctgctgaataacttctaccccagagaagccaaagtgcagtggaaggtggacaacgccctgcagagcggaaacagccaggaaagcgtgacagagcaggattccaaggattccacatacagcctgagcagcacactgacactgtccaaggccgactacgagaagcacaaggtgtacgcctgcgaagtgacacaccagggactgtcctcccctgtgacaaagagcttcaacagaggagaatgctga

SEQ ID NO: 138 - DNA, 5102 bp, Artificial Sequence
  Description of Artificial Sequence: Synthetic polynucleotide
tcgcgcgtttcggtgatgacggtgaaaacctctgacacatgcagctcccggagacggtcacagcttgtctgtaagcggatgccgggagcagacaagcccgtcagggcgcgtcagcgggtgttggcgggtgtcggggctggcttaactatgcggcatcagagcagattgtactgagagtgcaccatatgcggtgtgaaataccgcacagatgcgtaaggagaaaataccgcatcagattggctattggccattgcatacgttgtatccatatcataatatgtacatttatattggctcatgtccaacattaccgccatgttgacattgattattgactagttattaatagtaatcaattacggggtcattagttcatagcccatatatggagttccgcgttacataacttacggtaaatggcccgcctggctgaccgcccaacgacccccgcccattgacgtcaataatgacgtatgttcccatagtaacgccaatagggactttccattgacgtcaatgggtggagtatttacggtaaactgcccacttggcagtacatcaagtgtatcatatgccaagtacgccccctattgacgtcaatgacggtaaatggcccgcctggcattatgcccagtacatgaccttatgggactttcctacttggcagtacatctacgtattagtcatcgctattaccatggtgatgcggttttggcagtacatcaatgggcgtggatagcggtttgactcacggggatttccaagtctccaccccattgacgtcaatgggagtttgttttggcaccaaaatcaacgggactttccaaaatgtcgtaacaactccgccccattgacgcaaatgggcggtaggcgtgtacggtgggaggtctatataagcagagctcgtttagtgaaccgtcagatcgcctggagacgccatccacgctgttttgacctccatagaagacaccgggaccgatccagcctccatcggctcgcatctctccttcacgcgcccgccgccctacctgaggccgccatccacgccggttgagtcgcgttctgccgcctcccgcctgtggtgcctcctgaactgcgtccgccgtctaggtaagtttaaagctcaggtcgagaccgggcctttgtccggcgctcccttggagcctacctagactcagccggctctccacgctttgcctgaccctgcttgctcaactctagttaacggtggagggcagtgtagtctgagcagtactcgttgctgccgcgcgcgccaccagacataatagctgacagactaacagactgttcctttccatgggtcttttctgcagtcaccgtcgtcgacacgtgtgatcagatatcgcggccgctctagaccaccatgggatggtcatgtatcatcctttttctagtagcaactgcaaccggtgtacattcagagatcgtgctgacccagtcccccgccaccctgtccctgtcccccggcgagagggccaccatctcctgcaggacctcccagtacggctccctggcctggtaccagcagaagcccggccaggcccccaggctggtgatctactccggctccaccagggccgccggcatccccgccaggttctccggctccaggtccggccccgactacaccctgaccatctcctccctggagtccggcgacttcggcgtgtactactgccagcagtacgagttcttcggccccggcaccaaggtgcaggtggacatcaagcgtacggtggctgcaccatctgtcttcatcttcccgccatctgatgagcagttgaaatctggaactgcctctgttgtgtgcctgctgaataacttctaccccagagaagccaaagtgcagtggaaggtggacaacgccctgcagagcggaaacagccaggaaagcgtgacagagcaggattccaaggattccacatacagcctgagcagcacactgacactgtccaaggccgactacgagaagcacaaggtgtacgcctgcgaagtgacacaccagggactgtcctcccctgtgacaaagagcttcaacagaggagaatgctgataggatccagatctgctgtgccttctagttgccagccatctgttgtttgcccctcccccgtgccttccttgaccctggaaggtgccactcccactgtcctttcctaataaaatgaggaaattgcatcgcattgtctgagtaggtgtcattctattctggggggtggggtggggcaggacagcaagggggaggattgggaagacaatagcaggcatgctggggatgcggtgggctctatgggtacccaggtgctgaagaattgacccggttcctcctgggccagaaagaagcaggcacatccccttctctgtgacacaccctgtccacgcccctggttcttagttccagccccactcataggacactcatagctcaggagggctccgccttcaatcccacccgctaaagtacttggagcggtctctccctccctcatcagcccaccaaaccaaacctagcctccaagagtgggaagaaattaaagcaagataggctattaagtgcagagggagagaaaatgcctccaacatgtgaggaagtaatgagagaaatcatagaattttaaggccatgatttaaggccatcatggccttaatcttccgcttcctcgctcactgactcgctgcgctcggtcgttcggctgcggcgagcggtatcagctcactcaaaggcggtaatacggttatccacagaatcaggggataacgcaggaaagaacatgtgagcaaaaggccagcaaaaggccaggaaccgtaaaaaggccgcgttgctggcgtttttccataggctccgcccccctgacgagcatcacaaaaatcgacgctcaagtcagaggtggcgaaacccgacaggactataaagataccaggcgtttccccctggaagctccctcgtgcgctctcctgttccgaccctgccgcttaccggatacctgtccgcctttctcccttcgggaagcgtggcgctttctcatagctcacgctgtaggtatctcagttcggtgtaggtcgttcgctccaagctgggctgtgtgcacgaaccccccgttcagcccgaccgctgcgccttatccggtaactatcgtcttgagtccaacccggtaagacacgacttatcgccactggcagcagccactggtaacaggattagcagagcgaggtatgtaggcggtgctacagagttcttgaagtggtggcctaactacggctacactagaagaacagtatttggtatctgcgctctgctgaagccagttaccttcggaaaaagagttggtagctcttgatccggcaaacaaaccaccgctggtagcggtggtttttttgtttgcaagcagcagattacgcgcagaaaaaaaggatctcaagaagatcctttgatcttttctacggggtctgacgctcagtggaacgaaaactcacgttaagggattttggtcatgagattatcaaaaaggatcttcacctagatccttttaaattaaaaatgaagttttaaatcaatctaaagtatatatgagtaaacttggtctgacagttaccaatgcttaatcagtgaggcacctatctcagcgatctgtctatttcgttcatccatagttgcctgactcggggggggggggcgctgaggtctgcctcgtgaagaaggtgttgctgactcataccaggcctgaatcgccccatcatccagccagaaagtgagggagccacggttgatgagagctttgttgtaggtggaccagttggtgattttgaacttttgctttgccacggaacggtctgcgttgtcgggaagatgcgtgatctgatccttcaactcagcaaaagttcgatttattcaacaaagccgccgtcccgtcaagtcagcgtaatgctctgccagtgttacaaccaattaaccaattctgattagaaaaactcatcgagcatcaaatgaaactgcaatttattcatatcaggattatcaataccatatttttgaaaaagccgtttctgtaatgaaggagaaaactcaccgaggcagttccataggatggcaagatcctggtatcggtctgcgattccgactcgtccaacatcaatacaacctattaatttcccctcgtcaaaaataaggttatcaagtgagaaatcaccatgagtgacgactgaatccggtgagaatggcaaaagcttatgcatttctttccagacttgttcaacaggccagccattacgctcgtcatcaaaatcactcgcatcaaccaaaccgttattcattcgtgattgcgcctgagcgagacgaaatacgcgatcgctgttaaaaggacaattacaaacaggaatcgaatgcaaccggcgcaggaacactgccagcgcatcaacaatattttcacctgaatcaggatattcttctaatacctggaatgctgttttcccggggatcgcagtggtgagtaaccatgcatcatcaggagtacggataaaatgcttgatggtcggaagaggcataaattccgtcagccagtttagtctgaccatctcatctgtaacatcattggcaacgctacctttgccatgtttcagaaacaactctggcgcatcgggcttcccatacaatcgatagattgtcgcacctgattgcccgacattatcgcgagcccatttatacccatataaatcagcatccatgttggaatttaatcgcggcctcgagcaagacgtttcccgttgaatatggctcataacaccccttgtattactgtttatgtaagcagacagttttattgttcatgatgatatatttttatcttgtgcaatgtaacatcagagattttgagacacaacgtggctttccccccccccccattattgaagcatttatcagggttattgtctcatgagcggatacatatttgaatgtatttagaaaaataaacaaataggggttccgcgcacatttccccgaaaagtgccacctgacgtctaagaaaccattattatcatgacattaacctataaaaataggcgtatcacgaggccctttcgtc

SEQ ID NO: 139 - DNA, 690 bp, Artificial Sequence
  Description of Artificial Sequence: Synthetic polynucleotide
atgggatggtcatgtatcatcctttttctagtagcaactgcaaccggtgtacattcagaaattgtgttgacacagtctccaggcaccctgtctttgtctccaggggaaacagccatcatctcttgtcggaccagtcagtatggttccttagcctggtatcaacagaggcccggccaggcccccaggctcgtcatctattcgggctctactcgggccgctggcatcccagacaggttcagcggcagtcggtgggggccagactacaccctcaccatcagcaacctggagtcgggagattttggtgtttattattgccagcagtatgaattttttggccaggggaccaaggtccaggtcgacattaaacgtacggtggctgcaccatctgtcttcatcttcccgccatctgatgagcagttgaaatctggaactgcctctgttgtgtgcctgctgaataacttctaccccagagaagccaaagtgcagtggaaggtggacaacgccctgcagagcggaaacagccaggaaagcgtgacagagcaggattccaaggattccacatacagcctgagcagcacactgacactgtccaaggccgactacgagaagcacaaggtgtacgcctgcgaagtgacacaccagggactgtcctcccctgtgacaaagagcttcaacagaggagaatgctga

SEQ ID NO: 140 - DNA, 5102 bp, Artificial Sequence
  Description of Artificial Sequence: Synthetic polynucleotide
tcgcgcgtttcggtgatgacggtgaaaacctctgacacatgcagctcccggagacggtcacagcttgtctgtaagcggatgccgggagcagacaagcccgtcagggcgcgtcagcgggtgttggcgggtgtcggggctggcttaactatgcggcatcagagcagattgtactgagagtgcaccatatgcggtgtgaaataccgcacagatgcgtaaggagaaaataccgcatcagattggctattggccattgcatacgttgtatccatatcataatatgtacatttatattggctcatgtccaacattaccgccatgttgacattgattattgactagttattaatagtaatcaattacggggtcattagttcatagcccatatatggagttccgcgttacataacttacggtaaatggcccgcctggctgaccgcccaacgacccccgcccattgacgtcaataatgacgtatgttcccatagtaacgccaatagggactttccattgacgtcaatgggtggagtatttacggtaaactgcccacttggcagtacatcaagtgtatcatatgccaagtacgccccctattgacgtcaatgacggtaaatggcccgcctggcattatgcccagtacatgaccttatgggactttcctacttggcagtacatctacgtattagtcatcgctattaccatggtgatgcggttttggcagtacatcaatgggcgtggatagcggtttgactcacggggatttccaagtctccaccccattgacgtcaatgggagtttgttttggcaccaaaatcaacgggactttccaaaatgtcgtaacaactccgccccattgacgcaaatgggcggtaggcgtgtacggtgggaggtctatataagcagagctcgtttagtgaaccgtcagatcgcctggagacgccatccacgctgttttgacctccatagaagacaccgggaccgatccagcctccatcggctcgcatctctccttcacgcgcccgccgccctacctgaggccgccatccacgccggttgagtcgcgttctgccgcctcccgcctgtggtgcctcctgaactgcgtccgccgtctaggtaagtttaaagctcaggtcgagaccgggcctttgtccggcgctcccttggagcctacctagactcagccggctctccacgctttgcctgaccctgcttgctcaactctagttaacggtggagggcagtgtagtctgagcagtactcgttgctgccgcgcgcgccaccagacataatagctgacagactaacagactgttcctttccatgggtcttttctgcagtcaccgtcgtcgacacgtgtgatcagatatcgcggccgctctagaccaccatgggatggtcatgtatcatcctttttctagtagcaactgcaaccggtgtacattcagaaattgtgttgacacagtctccaggcaccctgtctttgtctccaggggaaacagccatcatctcttgtcggaccagtcagtatggttccttagcctggtatcaacagaggcccggccaggcccccaggctcgtcatctattcgggctctactcgggccgctggcatcccagacaggttcagcggcagtcggtgggggccagactacaccctcaccatcagcaacctggagtcgggagattttggtgtttattattgccagcagtatgaattttttggccaggggaccaaggtccaggtcgacattaaacgtacggtggctgcaccatctgtcttcatcttcccgccatctgatgagcagttgaaatctggaactgcctctgttgtgtgcctgctgaataacttctaccccagagaagccaaagtgcagtggaaggtggacaacgccctgcagagcggaaacagccaggaaagcgtgacagagcaggattccaaggattccacatacagcctgagcagcacactgacactgtccaaggccgactacgagaagcacaaggtgtacgcctgcgaagtgacacaccagggactgtcctcccctgtgacaaagagcttcaacagaggagaatgctgataggatccagatctgctgtgccttctagttgccagccatctgttgtttgcccctcccccgtgccttccttgaccctggaaggtgccactcccactgtcctttcctaataaaatgaggaaattgcatcgcattgtctgagtaggtgtcattctattctggggggtggggtggggcaggacagcaagggggaggattgggaagacaatagcaggcatgctggggatgcggtgggctctatgggtacccaggtgctgaagaattgacccggttcctcctgggccagaaagaagcaggcacatccccttctctgtgacacaccctgtccacgcccctggttcttagttccagccccactcataggacactcatagctcaggagggctccgccttcaatcccacccgctaaagtacttggagcggtctctccctccctcatcagcccaccaaaccaaacctagcctccaagagtgggaagaaattaaagcaagataggctattaagtgcagagggagagaaaatgcctccaacatgtgaggaagtaatgagagaaatcatagaattttaaggccatgatttaaggccatcatggccttaatcttccgcttcctcgctcactgactcgctgcgctcggtcgttcggctgcggcgagcggtatcagctcactcaaaggcggtaatacggttatccacagaatcaggggataacgcaggaaagaacatgtgagcaaaaggccagcaaaaggccaggaaccgtaaaaaggccgcgttgctggcgtttttccataggctccgcccccctgacgagcatcacaaaaatcgacgctcaagtcagaggtggcgaaacccgacaggactataaagataccaggcgtttccccctggaagctccctcgtgcgctctcctgttccgaccctgccgcttaccggatacctgtccgcctttctcccttcgggaagcgtggcgctttctcatagctcacgctgtaggtatctcagttcggtgtaggtcgttcgctccaagctgggctgtgtgcacgaaccccccgttcagcccgaccgctgcgccttatccggtaactatcgtcttgagtccaacccggtaagacacgacttatcgccactggcagcagccactggtaacaggattagcagagcgaggtatgtaggcggtgctacagagttcttgaagtggtggcctaactacggctacactagaagaacagtatttggtatctgcgctctgctgaagccagttaccttcggaaaaagagttggtagctcttgatccggcaaacaaaccaccgctggtagcggtggtttttttgtttgcaagcagcagattacgcgcagaaaaaaaggatctcaagaagatcctttgatcttttctacggggtctgacgctcagtggaacgaaaactcacgttaagggattttggtcatgagattatcaaaaaggatcttcacctagatccttttaaattaaaaatgaagttttaaatcaatctaaagtatatatgagtaaacttggtctgacagttaccaatgcttaatcagtgaggcacctatctcagcgatctgtctatttcgttcatccatagttgcctgactcggggggggggggcgctgaggtctgcctcgtgaagaaggtgttgctgactcataccaggcctgaatcgccccatcatccagccagaaagtgagggagccacggttgatgagagctttgttgtaggtggaccagttggtgattttgaacttttgctttgccacggaacggtctgcgttgtcgggaagatgcgtgatctgatccttcaactcagcaaaagttcgatttattcaacaaagccgccgtcccgtcaagtcagcgtaatgctctgccagtgttacaaccaattaaccaattctgattagaaaaactcatcgagcatcaaatgaaactgcaatttattcatatcaggattatcaataccatatttttgaaaaagccgtttctgtaatgaaggagaaaactcaccgaggcagttccataggatggcaagatcctggtatcggtctgcgattccgactcgtccaacatcaatacaacctattaatttcccctcgtcaaaaataaggttatcaagtgagaaatcaccatgagtgacgactgaatccggtgagaatggcaaaagcttatgcatttctttccagacttgttcaacaggccagccattacgctcgtcatcaaaatcactcgcatcaaccaaaccgttattcattcgtgattgcgcctgagcgagacgaaatacgcgatcgctgttaaaaggacaattacaaacaggaatcgaatgcaaccggcgcaggaacactgccagcgcatcaacaatattttcacctgaatcaggatattcttctaatacctggaatgctgttttcccggggatcgcagtggtgagtaaccatgcatcatcaggagtacggataaaatgcttgatggtcggaagaggcataaattccgtcagccagtttagtctgaccatctcatctgtaacatcattggcaacgctacctttgccatgtttcagaaacaactctggcgcatcgggcttcccatacaatcgatagattgtcgcacctgattgcccgacattatcgcgagcccatttatacccatataaatcagcatccatgttggaatttaatcgcggcctcgagcaagacgtttcccgttgaatatggctcataacaccccttgtattactgtttatgtaagcagacagttttattgttcatgatgatatatttttatcttgtgcaatgtaacatcagagattttgagacacaacgtggctttccccccccccccattattgaagcatttatcagggttattgtctcatgagcggatacatatttgaatgtatttagaaaaataaacaaataggggttccgcgcacatttccccgaaaagtgccacctgacgtctaagaaaccattattatcatgacattaacctataaaaataggcgtatcacgaggccctttcgtc

SEQ ID NO: 141 - DNA, 690 bp, Artificial Sequence
  Description of Artificial Sequence: Synthetic polynucleotide
atgggatggtcatgtatcatcctttttctagtagcaactgcaaccggtgtacattcagaaattgtgttgacacagtctccagccaccctgtctttgtctccaggggaaacagccatcatctcttgtcggaccagtcagtctggttccttagcctggtatcaacagaggcccggccaggcccccaggctcgtcatctattcgggttctactcgggccgctggcatcccagacaggttcagcggcagtcggtggggggcagactacaatctcagcatcagcaacctggagtcgggagattttggtgtttattattgtcagcagtatgaattttttggccaggggaccaaggtccaggtcgacattaagcgtacggtggctgcaccatctgtcttcatcttcccgccatctgatgagcagttgaaatctggaactgcctctgttgtgtgcctgctgaataacttctaccccagagaagccaaagtgcagtggaaggtggacaacgccctgcagagcggaaacagccaggaaagcgtgacagagcaggattccaaggattccacatacagcctgagcagcacactgacactgtccaaggccgactacgagaagcacaaggtgtacgcctgcgaagtgacacaccagggactgtcctcccctgtgacaaagagcttcaacagaggagaatgctga

SEQ ID NO: 142 - DNA, 5102 bp, Artificial Sequence
  Description of Artificial Sequence: Synthetic polynucleotide
tcgcgcgtttcggtgatgacggtgaaaacctctgacacatgcagctcccggagacggtcacagcttgtctgtaagcggatgccgggagcagacaagcccgtcagggcgcgtcagcgggtgttggcgggtgtcggggctggcttaactatgcggcatcagagcagattgtactgagagtgcaccatatgcggtgtgaaataccgcacagatgcgtaaggagaaaataccgcatcagattggctattggccattgcatacgttgtatccatatcataatatgtacatttatattggctcatgtccaacattaccgccatgttgacattgattattgactagttattaatagtaatcaattacggggtcattagttcatagcccatatatggagttccgcgttacataacttacggtaaatggcccgcctggctgaccgcccaacgacccccgcccattgacgtcaataatgacgtatgttcccatagtaacgccaatagggactttccattgacgtcaatgggtggagtatttacggtaaactgcccacttggcagtacatcaagtgtatcatatgccaagtacgccccctattgacgtcaatgacggtaaatggcccgcctggcattatgcccagtacatgaccttatgggactttcctacttggcagtacatctacgtattagtcatcgctattaccatggtgatgcggttttggcagtacatcaatgggcgtggatagcggtttgactcacggggatttccaagtctccaccccattgacgtcaatgggagtttgttttggcaccaaaatcaacgggactttccaaaatgtcgtaacaactccgccccattgacgcaaatgggcggtaggcgtgtacggtgggaggtctatataagcagagctcgtttagtgaaccgtcagatcgcctggagacgccatccacgctgttttgacctccatagaagacaccgggaccgatccagcctccatcggctcgcatctctccttcacgcgcccgccgccctacctgaggccgccatccacgccggttgagtcgcgttctgccgcctcccgcctgtggtgcctcctgaactgcgtccgccgtctaggtaagtttaaagctcaggtcgagaccgggcctttgtccggcgctcccttggagcctacctagactcagccggctctccacgctttgcctgaccctgcttgctcaactctagttaacggtggagggcagtgtagtctgagcagtactcgttgctgccgcgcgcgccaccagacataatagctgacagactaacagactgttcctttccatgggtcttttctgcagtcaccgtcgtcgacacgtgtgatcagatatcgcggccgctctagaccaccatgggatggtcatgtatcatcctttttctagtagcaactgcaaccggtgtacattcagaaattgtgttgacacagtctccagccaccctgtctttgtctccaggggaaacagccatcatctcttgtcggaccagtcagtctggttccttagcctggtatcaacagaggcccggccaggcccccaggctcgtcatctattcgggttctactcgggccgctggcatcccagacaggttcagcggcagtcggtggggggcagactacaatctcagcatcagcaacctggagtcgggagattttggtgtttattattgtcagcagtatgaattttttggccaggggaccaaggtccaggtcgacattaagcgtacggtggctgcaccatctgtcttcatcttcccgccatctgatgagcagttgaaatctggaactgcctctgttgtgtgcctgctgaataacttctaccccagagaagccaaagtgcagtggaaggtggacaacgccctgcagagcggaaacagccaggaaagcgtgacagagcaggattccaaggattccacatacagcctgagcagcacactgacactgtccaaggccgactacgagaagcacaaggtgtacgcctgcgaagtgacacaccagggactgtcctcccctgtgacaaagagcttcaacagaggagaatgctgataggatccagatctgctgtgccttctagttgccagccatctgttgtttgcccctcccccgtgccttccttgaccctggaaggtgccactcccactgtcctttcctaataaaatgaggaaattgcatcgcattgtctgagtaggtgtcattctattctggggggtggggtggggcaggacagcaagggggaggattgggaagacaatagcaggcatgctggggatgcggtgggctctatgggtacccaggtgctgaagaattgacccggttcctcctgggccagaaagaagcaggcacatccccttctctgtgacacaccctgtccacgcccctggttcttagttccagccccactcataggacactcatagctcaggagggctccgccttcaatcccacccgctaaagtacttggagcggtctctccctccctcatcagcccaccaaaccaaacctagcctccaagagtgggaagaaattaaagcaagataggctattaagtgcagagggagagaaaatgcctccaacatgtgaggaagtaatgagagaaatcatagaattttaaggccatgatttaaggccatcatggccttaatcttccgcttcctcgctcactgactcgctgcgctcggtcgttcggctgcggcgagcggtatcagctcactcaaaggcggtaatacggttatccacagaatcaggggataacgcaggaaagaacatgtgagcaaaaggccagcaaaaggccaggaaccgtaaaaaggccgcgttgctggcgtttttccataggctccgcccccctgacgagcatcacaaaaatcgacgctcaagtcagaggtggcgaaacccgacaggactataaagataccaggcgtttccccctggaagctccctcgtgcgctctcctgttccgaccctgccgcttaccggatacctgtccgcctttctcccttcgggaagcgtggcgctttctcatagctcacgctgtaggtatctcagttcggtgtaggtcgttcgctccaagctgggctgtgtgcacgaaccccccgttcagcccgaccgctgcgccttatccggtaactatcgtcttgagtccaacccggtaagacacgacttatcgccactggcagcagccactggtaacaggattagcagagcgaggtatgtaggcggtgctacagagttcttgaagtggtggcctaactacggctacactagaagaacagtatttggtatctgcgctctgctgaagccagttaccttcggaaaaagagttggtagctcttgatccggcaaacaaaccaccgctggtagcggtggtttttttgtttgcaagcagcagattacgcgcagaaaaaaaggatctcaagaagatcctttgatcttttctacggggtctgacgctcagtggaacgaaaactcacgttaagggattttggtcatgagattatcaaaaaggatcttcacctagatccttttaaattaaaaatgaagttttaaatcaatctaaagtatatatgagtaaacttggtctgacagttaccaatgcttaatcagtgaggcacctatctcagcgatctgtctatttcgttcatccatagttgcctgactcggggggggggggcgctgaggtctgcctcgtgaagaaggtgttgctgactcataccaggcctgaatcgccccatcatccagccagaaagtgagggagccacggttgatgagagctttgttgtaggtggaccagttggtgattttgaacttttgctttgccacggaacggtctgcgttgtcgggaagatgcgtgatctgatccttcaactcagcaaaagttcgatttattcaacaaagccgccgtcccgtcaagtcagcgtaatgctctgccagtgttacaaccaattaaccaattctgattagaaaaactcatcgagcatcaaatgaaactgcaatttattcatatcaggattatcaataccatatttttgaaaaagccgtttctgtaatgaaggagaaaactcaccgaggcagttccataggatggcaagatcctggtatcggtctgcgattccgactcgtccaacatcaatacaacctattaatttcccctcgtcaaaaataaggttatcaagtgagaaatcaccatgagtgacgactgaatccggtgagaatggcaaaagcttatgcatttctttccagacttgttcaacaggccagccattacgctcgtcatcaaaatcactcgcatcaaccaaaccgttattcattcgtgattgcgcctgagcgagacgaaatacgcgatcgctgttaaaaggacaattacaaacaggaatcgaatgcaaccggcgcaggaacactgccagcgcatcaacaatattttcacctgaatcaggatattcttctaatacctggaatgctgttttcccggggatcgcagtggtgagtaaccatgcatcatcaggagtacggataaaatgcttgatggtcggaagaggcataaattccgtcagccagtttagtctgaccatctcatctgtaacatcattggcaacgctacctttgccatgtttcagaaacaactctggcgcatcgggcttcccatacaatcgatagattgtcgcacctgattgcccgacattatcgcgagcccatttatacccatataaatcagcatccatgttggaatttaatcgcggcctcgagcaagacgtttcccgttgaatatggctcataacaccccttgtattactgtttatgtaagcagacagttttattgttcatgatgatatatttttatcttgtgcaatgtaacatcagagattttgagacacaacgtggctttccccccccccccattattgaagcatttatcagggttattgtctcatgagcggatacatatttgaatgtatttagaaaaataaacaaataggggttccgcgcacatttccccgaaaagtgccacctgacgtctaagaaaccattattatcatgacattaacctataaaaataggcgtatcacgaggccctttcgtc

SEQ ID NO: 143 - DNA, 690 bp, Artificial Sequence
  Description of Artificial Sequence: Synthetic polynucleotide
atgggatggtcatgtatcatcctttttctagtagcaactgcaaccggtgtacattcagagatcgtgctgacccagtcccccgccaccctgtccctgtcccccggcgagagggccaccctgtcctgcaggacctcccagtccggctccctggcctggtaccagcagaagcccggccaggcccccaggctggtgatctactccggctccaccagggccgccggcatccccgccaggttctccggctccaggtccggcgccgactacaccctgaccatctcctccctggagtccggcgacttcgccgtgtactactgccagcagtacgagttcttcggccccggcaccaaggtgcaggtggacatcaagcgtacggtggctgcaccatctgtcttcatcttcccgccatctgatgagcagttgaaatctggaactgcctctgttgtgtgcctgctgaataacttctaccccagagaagccaaagtgcagtggaaggtggacaacgccctgcagagcggaaacagccaggaaagcgtgacagagcaggattccaaggattccacatacagcctgagcagcacactgacactgtccaaggccgactacgagaagcacaaggtgtacgcctgcgaagtgacacaccagggactgtcctcccctgtgacaaagagcttcaacagaggagaatgctga

SEQ ID NO: 144 - DNA, 5102 bp, Artificial Sequence
  Description of Artificial Sequence: Synthetic polynucleotide
tcgcgcgtttcggtgatgacggtgaaaacctctgacacatgcagctcccggagacggtcacagcttgtctgtaagcggatgccgggagcagacaagcccgtcagggcgcgtcagcgggtgttggcgggtgtcggggctggcttaactatgcggcatcagagcagattgtactgagagtgcaccatatgcggtgtgaaataccgcacagatgcgtaaggagaaaataccgcatcagattggctattggccattgcatacgttgtatccatatcataatatgtacatttatattggctcatgtccaacattaccgccatgttgacattgattattgactagttattaatagtaatcaattacggggtcattagttcatagcccatatatggagttccgcgttacataacttacggtaaatggcccgcctggctgaccgcccaacgacccccgcccattgacgtcaataatgacgtatgttcccatagtaacgccaatagggactttccattgacgtcaatgggtggagtatttacggtaaactgcccacttggcagtacatcaagtgtatcatatgccaagtacgccccctattgacgtcaatgacggtaaatggcccgcctggcattatgcccagtacatgaccttatgggactttcctacttggcagtacatctacgtattagtcatcgctattaccatggtgatgcggttttggcagtacatcaatgggcgtggatagcggtttgactcacggggatttccaagtctccaccccattgacgtcaatgggagtttgttttggcaccaaaatcaacgggactttccaaaatgtcgtaacaactccgccccattgacgcaaatgggcggtaggcgtgtacggtgggaggtctatataagcagagctcgtttagtgaaccgtcagatcgcctggagacgccatccacgctgttttgacctccatagaagacaccgggaccgatccagcctccatcggctcgcatctctccttcacgcgcccgccgccctacctgaggccgccatccacgccggttgagtcgcgttctgccgcctcccgcctgtggtgcctcctgaactgcgtccgccgtctaggtaagtttaaagctcaggtcgagaccgggcctttgtccggcgctcccttggagcctacctagactcagccggctctccacgctttgcctgaccctgcttgctcaactctagttaacggtggagggcagtgtagtctgagcagtactcgttgctgccgcgcgcgccaccagacataatagctgacagactaacagactgttcctttccatgggtcttttctgcagtcaccgtcgtcgacacgtgtgatcagatatcgcggccgctctagaccaccatgggatggtcatgtatcatcctttttctagtagcaactgcaaccggtgtacattcagagatcgtgctgacccagtcccccgccaccctgtccctgtcccccggcgagagggccaccctgtcctgcaggacctcccagtccggctccctggcctggtaccagcagaagcccggccaggcccccaggctggtgatctactccggctccaccagggccgccggcatccccgccaggttctccggctccaggtccggcgccgactacaccctgaccatctcctccctggagtccggcgacttcgccgtgtactactgccagcagtacgagttcttcggccccggcaccaaggtgcaggtggacatcaagcgtacggtggctgcaccatctgtcttcatcttcccgccatctgatgagcagttgaaatctggaactgcctctgttgtgtgcctgctgaataacttctaccccagagaagccaaagtgcagtggaaggtggacaacgccctgcagagcggaaacagccaggaaagcgtgacagagcaggattccaaggattccacatacagcctgagcagcacactgacactgtccaaggccgactacgagaagcacaaggtgtacgcctgcgaagtgacacaccagggactgtcctcccctgtgacaaagagcttcaacagaggagaatgctgataggatccagatctgctgtgccttctagttgccagccatctgttgtttgcccctcccccgtgccttccttgaccctggaaggtgccactcccactgtcctttcctaataaaatgaggaaattgcatcgcattgtctgagtaggtgtcattctattctggggggtggggtggggcaggacagcaagggggaggattgggaagacaatagcaggcatgctggggatgcggtgggctctatgggtacccaggtgctgaagaattgacccggttcctcctgggccagaaagaagcaggcacatccccttctctgtgacacaccctgtccacgcccctggttcttagttccagccccactcataggacactcatagctcaggagggctccgccttcaatcccacccgctaaagtacttggagcggtctctccctccctcatcagcccaccaaaccaaacctagcctccaagagtgggaagaaattaaagcaagataggctattaagtgcagagggagagaaaatgcctccaacatgtgaggaagtaatgagagaaatcatagaattttaaggccatgatttaaggccatcatggccttaatcttccgcttcctcgctcactgactcgctgcgctcggtcgttcggctgcggcgagcggtatcagctcactcaaaggcggtaatacggttatccacagaatcaggggataacgcaggaaagaacatgtgagcaaaaggccagcaaaaggccaggaaccgtaaaaaggccgcgttgctggcgtttttccataggctccgcccccctgacgagcatcacaaaaatcgacgctcaagtcagaggtggcgaaacccgacaggactataaagataccaggcgtttccccctggaagctccctcgtgcgctctcctgttccgaccctgccgcttaccggatacctgtccgcctttctcccttcgggaagcgtggcgctttctcatagctcacgctgtaggtatctcagttcggtgtaggtcgttcgctccaagctgggctgtgtgcacgaaccccccgttcagcccgaccgctgcgccttatccggtaactatcgtcttgagtccaacccggtaagacacgacttatcgccactggcagcagccactggtaacaggattagcagagcgaggtatgtaggcggtgctacagagttcttgaagtggtggcctaactacggctacactagaagaacagtatttggtatctgcgctctgctgaagccagttaccttcggaaaaagagttggtagctcttgatccggcaaacaaaccaccgctggtagcggtggtttttttgtttgcaagcagcagattacgcgcagaaaaaaaggatctcaagaagatcctttgatcttttctacggggtctgacgctcagtggaacgaaaactcacgttaagggattttggtcatgagattatcaaaaaggatcttcacctagatccttttaaattaaaaatgaagttttaaatcaatctaaagtatatatgagtaaacttggtctgacagttaccaatgcttaatcagtgaggcacctatctcagcgatctgtctatttcgttcatccatagttgcctgactcggggggggggggcgctgaggtctgcctcgtgaagaaggtgttgctgactcataccaggcctgaatcgccccatcatccagccagaaagtgagggagccacggttgatgagagctttgttgtaggtggaccagttggtgattttgaacttttgctttgccacggaacggtctgcgttgtcgggaagatgcgtgatctgatccttcaactcagcaaaagttcgatttattcaacaaagccgccgtcccgtcaagtcagcgtaatgctctgccagtgttacaaccaattaaccaattctgattagaaaaactcatcgagcatcaaatgaaactgcaatttattcatatcaggattatcaataccatatttttgaaaaagccgtttctgtaatgaaggagaaaactcaccgaggcagttccataggatggcaagatcctggtatcggtctgcgattccgactcgtccaacatcaatacaacctattaatttcccctcgtcaaaaataaggttatcaagtgagaaatcaccatgagtgacgactgaatccggtgagaatggcaaaagcttatgcatttctttccagacttgttcaacaggccagccattacgctcgtcatcaaaatcactcgcatcaaccaaaccgttattcattcgtgattgcgcctgagcgagacgaaatacgcgatcgctgttaaaaggacaattacaaacaggaatcgaatgcaaccggcgcaggaacactgccagcgcatcaacaatattttcacctgaatcaggatattcttctaatacctggaatgctgttttcccggggatcgcagtggtgagtaaccatgcatcatcaggagtacggataaaatgcttgatggtcggaagaggcataaattccgtcagccagtttagtctgaccatctcatctgtaacatcattggcaacgctacctttgccatgtttcagaaacaactctggcgcatcgggcttcccatacaatcgatagattgtcgcacctgattgcccgacattatcgcgagcccatttatacccatataaatcagcatccatgttggaatttaatcgcggcctcgagcaagacgtttcccgttgaatatggctcataacaccccttgtattactgtttatgtaagcagacagttttattgttcatgatgatatatttttatcttgtgcaatgtaacatcagagattttgagacacaacgtggctttccccccccccccattattgaagcatttatcagggttattgtctcatgagcggatacatatttgaatgtatttagaaaaataaacaaataggggttccgcgcacatttccccgaaaagtgccacctgacgtctaagaaaccattattatcatgacattaacctataaaaataggcgtatcacgaggccctttcgtc

SEQ ID NO: 145 - DNA, 1425 bp, Artificial Sequence
  Description of Artificial Sequence: Synthetic polynucleotide
atgggatggtcatgtatcattctgtttctggtcgctaccgctaccggagtgcatagtcaggtccagctggtccagtcaggagcacaggtgaagaaaccaggcgcttcagtgaaggtcagctgcaaagcatccgggtacgagttcatcaactgtcccattaattgggtccggcaggcaccaggacagagacctgaatggatgggatggatgaagccacgaggaggagccgtgtcttatgctaggcagctgcagggccgcgtcaccatgacacgagacatgtacagctccaccgcctatctggagctgcggagactgacaagcgacgatactgcagtgtactattgcgccaggggcaaatactgtacagctcgcgactactataactgggattttgaacactggggacagggcactctggtgaccgtctctagtccgtcgaccaagggcccatcggtcttccccctggcaccctcctccaagagcacctctgggggcacagcggccctgggctgcctggtcaaggactacttccccgaacccgtgacggtgtcgtggaactcaggcgccctgaccagcggcgtgcacaccttcccggctgtcctacagtcctcaggactctactccctcagcagcgtggtgaccgtgccctccagcagcttgggcacccagacctacatctgcaacgtgaatcacaagcccagcaacaccaaggtggacaagaaagttgagcccaaatcttgtgacaaaactcacacatgcccaccgtgcccagcacctgaactcctggggggaccgtcagtcttcctcttccccccaaaacccaaggacaccctcatgatctcccggacccctgaggtcacatgcgtggtggtggacgtgagccacgaagaccctgaggtcaagttcaactggtacgtggacggcgtggaggtgcataatgccaagacaaagccgcgggaggagcagtacaacagcacgtaccgtgtggtcagcgtcctcaccgtcctgcaccaggactggctgaatggcaaggagtacaagtgcaaggtctccaacaaagccctcccagcccccatcgagaaaaccatctccaaagccaaagggcagccccgagaaccacaggtgtacaccctgcccccatcccgggatgagctgaccaagaaccaggtcagcctgacctgcctggtcaaaggcttctatcccagcgacatcgccgtggagtgggagagcaatgggcagccggagaacaactacaagaccacgcctcccgtgctggactccgacggctccttcttcctctacagcaagctcaccgtggacaagagcaggtggcagcaggggaacgtcttctcatgctccgtgatgcatgaggctctgcacaaccactacacgcagaagagcctctccctgtctccgggtaaatga

SEQ ID NO: 146 - DNA, 5837 bp, Artificial Sequence
  Description of Artificial Sequence: Synthetic polynucleotide
tcgcgcgtttcggtgatgacggtgaaaacctctgacacatgcagctcccggagacggtcacagcttgtctgtaagcggatgccgggagcagacaagcccgtcagggcgcgtcagcgggtgttggcgggtgtcggggctggcttaactatgcggcatcagagcagattgtactgagagtgcaccatatgcggtgtgaaataccgcacagatgcgtaaggagaaaataccgcatcagattggctattggccattgcatacgttgtatccatatcataatatgtacatttatattggctcatgtccaacattaccgccatgttgacattgattattgactagttattaatagtaatcaattacggggtcattagttcatagcccatatatggagttccgcgttacataacttacggtaaatggcccgcctggctgaccgcccaacgacccccgcccattgacgtcaataatgacgtatgttcccatagtaacgccaatagggactttccattgacgtcaatgggtggagtatttacggtaaactgcccacttggcagtacatcaagtgtatcatatgccaagtacgccccctattgacgtcaatgacggtaaatggcccgcctggcattatgcccagtacatgaccttatgggactttcctacttggcagtacatctacgtattagtcatcgctattaccatggtgatgcggttttggcagtacatcaatgggcgtggatagcggtttgactcacggggatttccaagtctccaccccattgacgtcaatgggagtttgttttggcaccaaaatcaacgggactttccaaaatgtcgtaacaactccgccccattgacgcaaatgggcggtaggcgtgtacggtgggaggtctatataagcagagctcgtttagtgaaccgtcagatcgcctggagacgccatccacgctgttttgacctccatagaagacaccgggaccgatccagcctccatcggctcgcatctctccttcacgcgcccgccgccctacctgaggccgccatccacgccggttgagtcgcgttctgccgcctcccgcctgtggtgcctcctgaactgcgtccgccgtctaggtaagtttaaagctcaggtcgagaccgggcctttgtccggcgctcccttggagcctacctagactcagccggctctccacgctttgcctgaccctgcttgctcaactctagttaacggtggagggcagtgtagtctgagcagtactcgttgctgccgcgcgcgccaccagacataatagctgacagactaacagactgttcctttccatgggtcttttctgcagtcaccgtcctcgacacgtgtgatcagatatcgcggccgctctagacaccatgggatggtcatgtatcattctgtttctggtcgctaccgctaccggagtgcatagtcaggtccagctggtccagtcaggagcacaggtgaagaaaccaggcgcttcagtgaaggtcagctgcaaagcatccgggtacgagttcatcaactgtcccattaattgggtccggcaggcaccaggacagagacctgaatggatgggatggatgaagccacgaggaggagccgtgtcttatgctaggcagctgcagggccgcgtcaccatgacacgagacatgtacagctccaccgcctatctggagctgcggagactgacaagcgacgatactgcagtgtactattgcgccaggggcaaatactgtacagctcgcgactactataactgggattttgaacactggggacagggcactctggtgaccgtctctagtccgtcgaccaagggcccatcggtcttccccctggcaccctcctccaagagcacctctgggggcacagcggccctgggctgcctggtcaaggactacttccccgaacccgtgacggtgtcgtggaactcaggcgccctgaccagcggcgtgcacaccttcccggctgtcctacagtcctcaggactctactccctcagcagcgtggtgaccgtgccctccagcagcttgggcacccagacctacatctgcaacgtgaatcacaagcccagcaacaccaaggtggacaagaaagttgagcccaaatcttgtgacaaaactcacacatgcccaccgtgcccagcacctgaactcctggggggaccgtcagtcttcctcttccccccaaaacccaaggacaccctcatgatctcccggacccctgaggtcacatgcgtggtggtggacgtgagccacgaagaccctgaggtcaagttcaactggtacgtggacggcgtggaggtgcataatgccaagacaaagccgcgggaggagcagtacaacagcacgtaccgtgtggtcagcgtcctcaccgtcctgcaccaggactggctgaatggcaaggagtacaagtgcaaggtctccaacaaagccctcccagcccccatcgagaaaaccatctccaaagccaaagggcagccccgagaaccacaggtgtacaccctgcccccatcccgggatgagctgaccaagaaccaggtcagcctgacctgcctggtcaaaggcttctatcccagcgacatcgccgtggagtgggagagcaatgggcagccggagaacaactacaagaccacgcctcccgtgctggactccgacggctccttcttcctctacagcaagctcaccgtggacaagagcaggtggcagcaggggaacgtcttctcatgctccgtgatgcatgaggctctgcacaaccactacacgcagaagagcctctccctgtctccgggtaaatgatgaggatccagatctgctgtgccttctagttgccagccatctgttgtttgcccctcccccgtgccttccttgaccctggaaggtgccactcccactgtcctttcctaataaaatgaggaaattgcatcgcattgtctgagtaggtgtcattctattctggggggtggggtggggcaggacagcaagggggaggattgggaagacaatagcaggcatgctggggatgcggtgggctctatgggtacccaggtgctgaagaattgacccggttcctcctgggccagaaagaagcaggcacatccccttctctgtgacacaccctgtccacgcccctggttcttagttccagccccactcataggacactcatagctcaggagggctccgccttcaatcccacccgctaaagtacttggagcggtctctccctccctcatcagcccaccaaaccaaacctagcctccaagagtgggaagaaattaaagcaagataggctattaagtgcagagggagagaaaatgcctccaacatgtgaggaagtaatgagagaaatcatagaattttaaggccatgatttaaggccatcatggccttaatcttccgcttcctcgctcactgactcgctgcgctcggtcgttcggctgcggcgagcggtatcagctcactcaaaggcggtaatacggttatccacagaatcaggggataacgcaggaaagaacatgtgagcaaaaggccagcaaaaggccaggaaccgtaaaaaggccgcgttgctggcgtttttccataggctccgcccccctgacgagcatcacaaaaatcgacgctcaagtcagaggtggcgaaacccgacaggactataaagataccaggcgtttccccctggaagctccctcgtgcgctctcctgttccgaccctgccgcttaccggatacctgtccgcctttctcccttcgggaagcgtggcgctttctcatagctcacgctgtaggtatctcagttcggtgtaggtcgttcgctccaagctgggctgtgtgcacgaaccccccgttcagcccgaccgctgcgccttatccggtaactatcgtcttgagtccaacccggtaagacacgacttatcgccactggcagcagccactggtaacaggattagcagagcgaggtatgtaggcggtgctacagagttcttgaagtggtggcctaactacggctacactagaagaacagtatttggtatctgcgctctgctgaagccagttaccttcggaaaaagagttggtagctcttgatccggcaaacaaaccaccgctggtagcggtggtttttttgtttgcaagcagcagattacgcgcagaaaaaaaggatctcaagaagatcctttgatcttttctacggggtctgacgctcagtggaacgaaaactcacgttaagggattttggtcatgagattatcaaaaaggatcttcacctagatccttttaaattaaaaatgaagttttaaatcaatctaaagtatatatgagtaaacttggtctgacagttaccaatgcttaatcagtgaggcacctatctcagcgatctgtctatttcgttcatccatagttgcctgactcggggggggggggcgctgaggtctgcctcgtgaagaaggtgttgctgactcataccaggcctgaatcgccccatcatccagccagaaagtgagggagccacggttgatgagagctttgttgtaggtggaccagttggtgattttgaacttttgctttgccacggaacggtctgcgttgtcgggaagatgcgtgatctgatccttcaactcagcaaaagttcgatttattcaacaaagccgccgtcccgtcaagtcagcgtaatgctctgccagtgttacaaccaattaaccaattctgattagaaaaactcatcgagcatcaaatgaaactgcaatttattcatatcaggattatcaataccatatttttgaaaaagccgtttctgtaatgaaggagaaaactcaccgaggcagttccataggatggcaagatcctggtatcggtctgcgattccgactcgtccaacatcaatacaacctattaatttcccctcgtcaaaaataaggttatcaagtgagaaatcaccatgagtgacgactgaatccggtgagaatggcaaaagcttatgcatttctttccagacttgttcaacaggccagccattacgctcgtcatcaaaatcactcgcatcaaccaaaccgttattcattcgtgattgcgcctgagcgagacgaaatacgcgatcgctgttaaaaggacaattacaaacaggaatcgaatgcaaccggcgcaggaacactgccagcgcatcaacaatattttcacctgaatcaggatattcttctaatacctggaatgctgttttcccggggatcgcagtggtgagtaaccatgcatcatcaggagtacggataaaatgcttgatggtcggaagaggcataaattccgtcagccagtttagtctgaccatctcatctgtaacatcattggcaacgctacctttgccatgtttcagaaacaactctggcgcatcgggcttcccatacaatcgatagattgtcgcacctgattgcccgacattatcgcgagcccatttatacccatataaatcagcatccatgttggaatttaatcgcggcctcgagcaagacgtttcccgttgaatatggctcataacaccccttgtattactgtttatgtaagcagacagttttattgttcatgatgatatatttttatcttgtgcaatgtaacatcagagattttgagacacaacgtggctttccccccccccccattattgaagcatttatcagggttattgtctcatgagcggatacatatttgaatgtatttagaaaaataaacaaataggggttccgcgcacatttccccgaaaagtgccacctgacgtctaagaaaccattattatcatgacattaacctataaaaataggcgtatcacgaggccctttcgtc

SEQ ID NO: 147 - DNA, 1425 bp, Artificial Sequence
  Description of Artificial Sequence: Synthetic polynucleotide
atgggatggtcttgtattattctgtttctggtcgcaaccgccacaggggtccactctcaggtgcagctggtccagtccggggctcaggtgaagaaaccaggcgactcagtgaaggtcagctgcaaagcttccgggtacgagttcatcaactgtcccattaattgggtccggctggcaccaggacagagacctgaatggatgggatggatgaagccacgaggaggagccgtgtcttatgctaggcagctgcagggccgcgtcaccatgacacgagatatgtacagctccaccgcctatctggagctgcggagactgacaagcgacgatactgcagtgtactattgcgccaggggcaaatactgtacagctcgcgactactataactgggattttgaacactggggacagggcactctggtgaccgtctctagtccgtcgaccaagggcccatcggtcttccccctggcaccctcctccaagagcacctctgggggcacagcggccctgggctgcctggtcaaggactacttccccgaacccgtgacggtgtcgtggaactcaggcgccctgaccagcggcgtgcacaccttcccggctgtcctacagtcctcaggactctactccctcagcagcgtggtgaccgtgccctccagcagcttgggcacccagacctacatctgcaacgtgaatcacaagcccagcaacaccaaggtggacaagaaagttgagcccaaatcttgtgacaaaactcacacatgcccaccgtgcccagcacctgaactcctggggggaccgtcagtcttcctcttccccccaaaacccaaggacaccctcatgatctcccggacccctgaggtcacatgcgtggtggtggacgtgagccacgaagaccctgaggtcaagttcaactggtacgtggacggcgtggaggtgcataatgccaagacaaagccgcgggaggagcagtacaacagcacgtaccgtgtggtcagcgtcctcaccgtcctgcaccaggactggctgaatggcaaggagtacaagtgcaaggtctccaacaaagccctcccagcccccatcgagaaaaccatctccaaagccaaagggcagccccgagaaccacaggtgtacaccctgcccccatcccgggatgagctgaccaagaaccaggtcagcctgacctgcctggtcaaaggcttctatcccagcgacatcgccgtggagtgggagagcaatgggcagccggagaacaactacaagaccacgcctcccgtgctggactccgacggctccttcttcctctacagcaagctcaccgtggacaagagcaggtggcagcaggggaacgtcttctcatgctccgtgatgcatgaggctctgcacaaccactacacgcagaagagcctctccctgtctccgggtaaatga

SEQ ID NO: 148 - DNA, 5837 bp, Artificial Sequence
  Description of Artificial Sequence: Synthetic polynucleotide
tcgcgcgtttcggtgatgacggtgaaaacctctgacacatgcagctcccggagacggtcacagcttgtctgtaagcggatgccgggagcagacaagcccgtcagggcgcgtcagcgggtgttggcgggtgtcggggctggcttaactatgcggcatcagagcagattgtactgagagtgcaccatatgcggtgtgaaataccgcacagatgcgtaaggagaaaataccgcatcagattggctattggccattgcatacgttgtatccatatcataatatgtacatttatattggctcatgtccaacattaccgccatgttgacattgattattgactagttattaatagtaatcaattacggggtcattagttcatagcccatatatggagttccgcgttacataacttacggtaaatggcccgcctggctgaccgcccaacgacccccgcccattgacgtcaataatgacgtatgttcccatagtaacgccaatagggactttccattgacgtcaatgggtggagtatttacggtaaactgcccacttggcagtacatcaagtgtatcatatgccaagtacgccccctattgacgtcaatgacggtaaatggcccgcctggcattatgcccagtacatgaccttatgggactttcctacttggcagtacatctacgtattagtcatcgctattaccatggtgatgcggttttggcagtacatcaatgggcgtggatagcggtttgactcacggggatttccaagtctccaccccattgacgtcaatgggagtttgttttggcaccaaaatcaacgggactttccaaaatgtcgtaacaactccgccccattgacgcaaatgggcggtaggcgtgtacggtgggaggtctatataagcagagctcgtttagtgaaccgtcagatcgcctggagacgccatccacgctgttttgacctccatagaagacaccgggaccgatccagcctccatcggctcgcatctctccttcacgcgcccgccgccctacctgaggccgccatccacgccggttgagtcgcgttctgccgcctcccgcctgtggtgcctcctgaactgcgtccgccgtctaggtaagtttaaagctcaggtcgagaccgggcctttgtccggcgctcccttggagcctacctagactcagccggctctccacgctttgcctgaccctgcttgctcaactctagttaacggtggagggcagtgtagtctgagcagtactcgttgctgccgcgcgcgccaccagacataatagctgacagactaacagactgttcctttccatgggtcttttctgcagtcaccgtcctcgacacgtgtgatcagatatcgcggccgctctagacaccatgggatggtcttgtattattctgtttctggtcgcaaccgccacaggggtccactctcaggtgcagctggtccagtccggggctcaggtgaagaaaccaggcgactcagtgaaggtcagctgcaaagcttccgggtacgagttcatcaactgtcccattaattgggtccggctggcaccaggacagagacctgaatggatgggatggatgaagccacgaggaggagccgtgtcttatgctaggcagctgcagggccgcgtcaccatgacacgagatatgtacagctccaccgcctatctggagctgcggagactgacaagcgacgatactgcagtgtactattgcgccaggggcaaatactgtacagctcgcgactactataactgggattttgaacactggggacagggcactctggtgaccgtctctagtccgtcgaccaagggcccatcggtcttccccctggcaccctcctccaagagcacctctgggggcacagcggccctgggctgcctggtcaaggactacttccccgaacccgtgacggtgtcgtggaactcaggcgccctgaccagcggcgtgcacaccttcccggctgtcctacagtcctcaggactctactccctcagcagcgtggtgaccgtgccctccagcagcttgggcacccagacctacatctgcaacgtgaatcacaagcccagcaacaccaaggtggacaagaaagttgagcccaaatcttgtgacaaaactcacacatgcccaccgtgcccagcacctgaactcctggggggaccgtcagtcttcctcttccccccaaaacccaaggacaccctcatgatctcccggacccctgaggtcacatgcgtggtggtggacgtgagccacgaagaccctgaggtcaagttcaactggtacgtggacggcgtggaggtgcataatgccaagacaaagccgcgggaggagcagtacaacagcacgtaccgtgtggtcagcgtcctcaccgtcctgcaccaggactggctgaatggcaaggagtacaagtgcaaggtctccaacaaagccctcccagcccccatcgagaaaaccatctccaaagccaaagggcagccccgagaaccacaggtgtacaccctgcccccatcccgggatgagctgaccaagaaccaggtcagcctgacctgcctggtcaaaggcttctatcccagcgacatcgccgtggagtgggagagcaatgggcagccggagaacaactacaagaccacgcctcccgtgctggactccgacggctccttcttcctctacagcaagctcaccgtggacaagagcaggtggcagcaggggaacgtcttctcatgctccgtgatgcatgaggctctgcacaaccactacacgcagaagagcctctccctgtctccgggtaaatgatgaggatccagatctgctgtgccttctagttgccagccatctgttgtttgcccctcccccgtgccttccttgaccctggaaggtgccactcccactgtcctttcctaataaaatgaggaaattgcatcgcattgtctgagtaggtgtcattctattctggggggtggggtggggcaggacagcaagggggaggattgggaagacaatagcaggcatgctggggatgcggtgggctctatgggtacccaggtgctgaagaattgacccggttcctcctgggccagaaagaagcaggcacatccccttctctgtgacacaccctgtccacgcccctggttcttagttccagccccactcataggacactcatagctcaggagggctccgccttcaatcccacccgctaaagtacttggagcggtctctccctccctcatcagcccaccaaaccaaacctagcctccaagagtgggaagaaattaaagcaagataggctattaagtgcagagggagagaaaatgcctccaacatgtgaggaagtaatgagagaaatcatagaattttaaggccatgatttaaggccatcatggccttaatcttccgcttcctcgctcactgactcgctgcgctcggtcgttcggctgcggcgagcggtatcagctcactcaaaggcggtaatacggttatccacagaatcaggggataacgcaggaaagaacatgtgagcaaaaggccagcaaaaggccaggaaccgtaaaaaggccgcgttgctggcgtttttccataggctccgcccccctgacgagcatcacaaaaatcgacgctcaagtcagaggtggcgaaacccgacaggactataaagataccaggcgtttccccctggaagctccctcgtgcgctctcctgttccgaccctgccgcttaccggatacctgtccgcctttctcccttcgggaagcgtggcgctttctcatagctcacgctgtaggtatctcagttcggtgtaggtcgttcgctccaagctgggctgtgtgcacgaaccccccgttcagcccgaccgctgcgccttatccggtaactatcgtcttgagtccaacccggtaagacacgacttatcgccactggcagcagccactggtaacaggattagcagagcgaggtatgtaggcggtgctacagagttcttgaagtggtggcctaactacggctacactagaagaacagtatttggtatctgcgctctgctgaagccagttaccttcggaaaaagagttggtagctcttgatccggcaaacaaaccaccgctggtagcggtggtttttttgtttgcaagcagcagattacgcgcagaaaaaaaggatctcaagaagatcctttgatcttttctacggggtctgacgctcagtggaacgaaaactcacgttaagggattttggtcatgagattatcaaaaaggatcttcacctagatccttttaaattaaaaatgaagttttaaatcaatctaaagtatatatgagtaaacttggtctgacagttaccaatgcttaatcagtgaggcacctatctcagcgatctgtctatttcgttcatccatagttgcctgactcggggggggggggcgctgaggtctgcctcgtgaagaaggtgttgctgactcataccaggcctgaatcgccccatcatccagccagaaagtgagggagccacggttgatgagagctttgttgtaggtggaccagttggtgattttgaacttttgctttgccacggaacggtctgcgttgtcgggaagatgcgtgatctgatccttcaactcagcaaaagttcgatttattcaacaaagccgccgtcccgtcaagtcagcgtaatgctctgccagtgttacaaccaattaaccaattctgattagaaaaactcatcgagcatcaaatgaaactgcaatttattcatatcaggattatcaataccatatttttgaaaaagccgtttctgtaatgaaggagaaaactcaccgaggcagttccataggatggcaagatcctggtatcggtctgcgattccgactcgtccaacatcaatacaacctattaatttcccctcgtcaaaaataaggttatcaagtgagaaatcaccatgagtgacgactgaatccggtgagaatggcaaaagcttatgcatttctttccagacttgttcaacaggccagccattacgctcgtcatcaaaatcactcgcatcaaccaaaccgttattcattcgtgattgcgcctgagcgagacgaaatacgcgatcgctgttaaaaggacaattacaaacaggaatcgaatgcaaccggcgcaggaacactgccagcgcatcaacaatattttcacctgaatcaggatattcttctaatacctggaatgctgttttcccggggatcgcagtggtgagtaaccatgcatcatcaggagtacggataaaatgcttgatggtcggaagaggcataaattccgtcagccagtttagtctgaccatctcatctgtaacatcattggcaacgctacctttgccatgtttcagaaacaactctggcgcatcgggcttcccatacaatcgatagattgtcgcacctgattgcccgacattatcgcgagcccatttatacccatataaatcagcatccatgttggaatttaatcgcggcctcgagcaagacgtttcccgttgaatatggctcataacaccccttgtattactgtttatgtaagcagacagttttattgttcatgatgatatatttttatcttgtgcaatgtaacatcagagattttgagacacaacgtggctttccccccccccccattattgaagcatttatcagggttattgtctcatgagcggatacatatttgaatgtatttagaaaaataaacaaataggggttccgcgcacatttccccgaaaagtgccacctgacgtctaagaaaccattattatcatgacattaacctataaaaataggcgtatcacgaggccctttcgtc

SEQ ID NO: 149 - DNA, 1425 bp, Artificial Sequence
  Description of Artificial Sequence: Synthetic polynucleotide
atgggatggagctgtattattctgttcctggtggctaccgctaccggcgtgcattctcaggtccgactgtctcagagtggggggcagatgaagaaaccaggcgactcaatgcggatcagctgcagagcctccgggtacgagttcattaactgtcccatcaattggattcggctggctcccgggaagagacctgaatggatgggatggatgaaacctcgaggaggagcagcttctgcagcaaggcagctgcagggacgagtgaccatgacacgagatatgtatagcgagaccgccttcctggaactgaggtctctgacaagtgacgatactgctgtctacttttgcaccaggggcaagtattgtacagcacgcgactactataactgggattttgagcactggggacagggcactcccgtgaccgtcagctccccgtcgaccaagggcccatcggtcttccccctggcaccctcctccaagagcacctctgggggcacagcggccctgggctgcctggtcaaggactacttccccgaacccgtgacggtgtcgtggaactcaggcgccctgaccagcggcgtgcacaccttcccggctgtcctacagtcctcaggactctactccctcagcagcgtggtgaccgtgccctccagcagcttgggcacccagacctacatctgcaacgtgaatcacaagcccagcaacaccaaggtggacaagaaagttgagcccaaatcttgtgacaaaactcacacatgcccaccgtgcccagcacctgaactcctggggggaccgtcagtcttcctcttccccccaaaacccaaggacaccctcatgatctcccggacccctgaggtcacatgcgtggtggtggacgtgagccacgaagaccctgaggtcaagttcaactggtacgtggacggcgtggaggtgcataatgccaagacaaagccgcgggaggagcagtacaacagcacgtaccgtgtggtcagcgtcctcaccgtcctgcaccaggactggctgaatggcaaggagtacaagtgcaaggtctccaacaaagccctcccagcccccatcgagaaaaccatctccaaagccaaagggcagccccgagaaccacaggtgtacaccctgcccccatcccgggatgagctgaccaagaaccaggtcagcctgacctgcctggtcaaaggcttctatcccagcgacatcgccgtggagtgggagagcaatgggcagccggagaacaactacaagaccacgcctcccgtgctggactccgacggctccttcttcctctacagcaagctcaccgtggacaagagcaggtggcagcaggggaacgtcttctcatgctccgtgatgcatgaggctctgcacaaccactacacgcagaagagcctctccctgtctccgggtaaatga

SEQ ID NO: 150 - DNA, 5837 bp, Artificial Sequence
  Description of Artificial Sequence: Synthetic polynucleotide
tcgcgcgtttcggtgatgacggtgaaaacctctgacacatgcagctcccggagacggtcacagcttgtctgtaagcggatgccgggagcagacaagcccgtcagggcgcgtcagcgggtgttggcgggtgtcggggctggcttaactatgcggcatcagagcagattgtactgagagtgcaccatatgcggtgtgaaataccgcacagatgcgtaaggagaaaataccgcatcagattggctattggccattgcatacgttgtatccatatcataatatgtacatttatattggctcatgtccaacattaccgccatgttgacattgattattgactagttattaatagtaatcaattacggggtcattagttcatagcccatatatggagttccgcgttacataacttacggtaaatggcccgcctggctgaccgcccaacgacccccgcccattgacgtcaataatgacgtatgttcccatagtaacgccaatagggactttccattgacgtcaatgggtggagtatttacggtaaactgcccacttggcagtacatcaagtgtatcatatgccaagtacgccccctattgacgtcaatgacggtaaatggcccgcctggcattatgcccagtacatgaccttatgggactttcctacttggcagtacatctacgtattagtcatcgctattaccatggtgatgcggttttggcagtacatcaatgggcgtggatagcggtttgactcacggggatttccaagtctccaccccattgacgtcaatgggagtttgttttggcaccaaaatcaacgggactttccaaaatgtcgtaacaactccgccccattgacgcaaatgggcggtaggcgtgtacggtgggaggtctatataagcagagctcgtttagtgaaccgtcagatcgcctggagacgccatccacgctgttttgacctccatagaagacaccgggaccgatccagcctccatcggctcgcatctctccttcacgcgcccgccgccctacctgaggccgccatccacgccggttgagtcgcgttctgccgcctcccgcctgtggtgcctcctgaactgcgtccgccgtctaggtaagtttaaagctcaggtcgagaccgggcctttgtccggcgctcccttggagcctacctagactcagccggctctccacgctttgcctgaccctgcttgctcaactctagttaacggtggagggcagtgtagtctgagcagtactcgttgctgccgcgcgcgccaccagacataatagctgacagactaacagactgttcctttccatgggtcttttctgcagtcaccgtcctcgacacgtgtgatcagatatcgcggccgctctagacaccatgggatggagctgtattattctgttcctggtggctaccgctaccggcgtgcattctcaggtccgactgtctcagagtggggggcagatgaagaaaccaggcgactcaatgcggatcagctgcagagcctccgggtacgagttcattaactgtcccatcaattggattcggctggctcccgggaagagacctgaatggatgggatggatgaaacctcgaggaggagcagcttctgcagcaaggcagctgcagggacgagtgaccatgacacgagatatgtatagcgagaccgccttcctggaactgaggtctctgacaagtgacgatactgctgtctacttttgcaccaggggcaagtattgtacagcacgcgactactataactgggattttgagcactggggacagggcactcccgtgaccgtcagctccccgtcgaccaagggcccatcggtcttccccctggcaccctcctccaagagcacctctgggggcacagcggccctgggctgcctggtcaaggactacttccccgaacccgtgacggtgtcgtggaactcaggcgccctgaccagcggcgtgcacaccttcccggctgtcctacagtcctcaggactctactccctcagcagcgtggtgaccgtgccctccagcagcttgggcacccagacctacatctgcaacgtgaatcacaagcccagcaacaccaaggtggacaagaaagttgagcccaaatcttgtgacaaaactcacacatgcccaccgtgcccagcacctgaactcctggggggaccgtcagtcttcctcttccccccaaaacccaaggacaccctcatgatctcccggacccctgaggtcacatgcgtggtggtggacgtgagccacgaagaccctgaggtcaagttcaactggtacgtggacggcgtggaggtgcataatgccaagacaaagccgcgggaggagcagtacaacagcacgtaccgtgtggtcagcgtcctcaccgtcctgcaccaggactggctgaatggcaaggagtacaagtgcaaggtctccaacaaagccctcccagcccccatcgagaaaaccatctccaaagccaaagggcagccccgagaaccacaggtgtacaccctgcccccatcccgggatgagctgaccaagaaccaggtcagcctgacctgcctggtcaaaggcttctatcccagcgacatcgccgtggagtgggagagcaatgggcagccggagaacaactacaagaccacgcctcccgtgctggactccgacggctccttcttcctctacagcaagctcaccgtggacaagagcaggtggcagcaggggaacgtcttctcatgctccgtgatgcatgaggctctgcacaaccactacacgcagaagagcctctccctgtctccgggtaaatgatgaggatccagatctgctgtgccttctagttgccagccatctgttgtttgcccctcccccgtgccttccttgaccctggaaggtgccactcccactgtcctttcctaataaaatgaggaaattgcatcgcattgtctgagtaggtgtcattctattctggggggtggggtggggcaggacagcaagggggaggattgggaagacaatagcaggcatgctggggatgcggtgggctctatgggtacccaggtgctgaagaattgacccggttcctcctgggccagaaagaagcaggcacatccccttctctgtgacacaccctgtccacgcccctggttcttagttccagccccactcataggacactcatagctcaggagggctccgccttcaatcccacccgctaaagtacttggagcggtctctccctccctcatcagcccaccaaaccaaacctagcctccaagagtgggaagaaattaaagcaagataggctattaagtgcagagggagagaaaatgcctccaacatgtgaggaagtaatgagagaaatcatagaattttaaggccatgatttaaggccatcatggccttaatcttccgcttcctcgctcactgactcgctgcgctcggtcgttcggctgcggcgagcggtatcagctcactcaaaggcggtaatacggttatccacagaatcaggggataacgcaggaaagaacatgtgagcaaaaggccagcaaaaggccaggaaccgtaaaaaggccgcgttgctggcgtttttccataggctccgcccccctgacgagcatcacaaaaatcgacgctcaagtcagaggtggcgaaacccgacaggactataaagataccaggcgtttccccctggaagctccctcgtgcgctctcctgttccgaccctgccgcttaccggatacctgtccgcctttctcccttcgggaagcgtggcgctttctcatagctcacgctgtaggtatctcagttcggtgtaggtcgttcgctccaagctgggctgtgtgcacgaaccccccgttcagcccgaccgctgcgccttatccggtaactatcgtcttgagtccaacccggtaagacacgacttatcgccactggcagcagccactggtaacaggattagcagagcgaggtatgtaggcggtgctacagagttcttgaagtggtggcctaactacggctacactagaagaacagtatttggtatctgcgctctgctgaagccagttaccttcggaaaaagagttggtagctcttgatccggcaaacaaaccaccgctggtagcggtggtttttttgtttgcaagcagcagattacgcgcagaaaaaaaggatctcaagaagatcctttgatcttttctacggggtctgacgctcagtggaacgaaaactcacgttaagggattttggtcatgagattatcaaaaaggatcttcacctagatccttttaaattaaaaatgaagttttaaatcaatctaaagtatatatgagtaaacttggtctgacagttaccaatgcttaatcagtgaggcacctatctcagcgatctgtctatttcgttcatccatagttgcctgactcggggggggggggcgctgaggtctgcctcgtgaagaaggtgttgctgactcataccaggcctgaatcgccccatcatccagccagaaagtgagggagccacggttgatgagagctttgttgtaggtggaccagttggtgattttgaacttttgctttgccacggaacggtctgcgttgtcgggaagatgcgtgatctgatccttcaactcagcaaaagttcgatttattcaacaaagccgccgtcccgtcaagtcagcgtaatgctctgccagtgttacaaccaattaaccaattctgattagaaaaactcatcgagcatcaaatgaaactgcaatttattcatatcaggattatcaataccatatttttgaaaaagccgtttctgtaatgaaggagaaaactcaccgaggcagttccataggatggcaagatcctggtatcggtctgcgattccgactcgtccaacatcaatacaacctattaatttcccctcgtcaaaaataaggttatcaagtgagaaatcaccatgagtgacgactgaatccggtgagaatggcaaaagcttatgcatttctttccagacttgttcaacaggccagccattacgctcgtcatcaaaatcactcgcatcaaccaaaccgttattcattcgtgattgcgcctgagcgagacgaaatacgcgatcgctgttaaaaggacaattacaaacaggaatcgaatgcaaccggcgcaggaacactgccagcgcatcaacaatattttcacctgaatcaggatattcttctaatacctggaatgctgttttcccggggatcgcagtggtgagtaaccatgcatcatcaggagtacggataaaatgcttgatggtcggaagaggcataaattccgtcagccagtttagtctgaccatctcatctgtaacatcattggcaacgctacctttgccatgtttcagaaacaactctggcgcatcgggcttcccatacaatcgatagattgtcgcacctgattgcccgacattatcgcgagcccatttatacccatataaatcagcatccatgttggaatttaatcgcggcctcgagcaagacgtttcccgttgaatatggctcataacaccccttgtattactgtttatgtaagcagacagttttattgttcatgatgatatatttttatcttgtgcaatgtaacatcagagattttgagacacaacgtggctttccccccccccccattattgaagcatttatcagggttattgtctcatgagcggatacatatttgaatgtatttagaaaaataaacaaataggggttccgcgcacatttccccgaaaagtgccacctgacgtctaagaaaccattattatcatgacattaacctataaaaataggcgtatcacgaggccctttcgtc

SEQ ID NO: 151 - DNA, 1425 bp, Artificial Sequence
  Description of Artificial Sequence: Synthetic polynucleotide
atgggctggtcttgtattatcctgtttctggtcgctaccgctactggcgtccattctcaggtccggctgtctcagtctggggggcagatgaagaaaccaggagactcaatgcggatcagctgcagagcttccggctacgagttcattaactgtcccatcaattggattcggctggcacccggcaagagacctgaatggatgggatggatgaaacctcgaggaggagcaggatctggcgctaggcagctgcagggacgagtgaccatgacacgagatatgtatagcgagaccgccttcctggaactgaggtctctgacaagtgacgatactgcagtctacttttgcaccaggggcaagtattgtacagcccgcgactactataactgggattttgagcactgggggcagggaactcccgtgaccgtcagctccccgtcgaccaagggcccatcggtcttccccctggcaccctcctccaagagcacctctgggggcacagcggccctgggctgcctggtcaaggactacttccccgaacccgtgacggtgtcgtggaactcaggcgccctgaccagcggcgtgcacaccttcccggctgtcctacagtcctcaggactctactccctcagcagcgtggtgaccgtgccctccagcagcttgggcacccagacctacatctgcaacgtgaatcacaagcccagcaacaccaaggtggacaagaaagttgagcccaaatcttgtgacaaaactcacacatgcccaccgtgcccagcacctgaactcctggggggaccgtcagtcttcctcttccccccaaaacccaaggacaccctcatgatctcccggacccctgaggtcacatgcgtggtggtggacgtgagccacgaagaccctgaggtcaagttcaactggtacgtggacggcgtggaggtgcataatgccaagacaaagccgcgggaggagcagtacaacagcacgtaccgtgtggtcagcgtcctcaccgtcctgcaccaggactggctgaatggcaaggagtacaagtgcaaggtctccaacaaagccctcccagcccccatcgagaaaaccatctccaaagccaaagggcagccccgagaaccacaggtgtacaccctgcccccatcccgggatgagctgaccaagaaccaggtcagcctgacctgcctggtcaaaggcttctatcccagcgacatcgccgtggagtgggagagcaatgggcagccggagaacaactacaagaccacgcctcccgtgctggactccgacggctccttcttcctctacagcaagctcaccgtggacaagagcaggtggcagcaggggaacgtcttctcatgctccgtgatgcatgaggctctgcacaaccactacacgcagaagagcctctccctgtctccgggtaaatga

SEQ ID NO: 152 - DNA, 5837 bp, Artificial Sequence
  Description of Artificial Sequence: Synthetic polynucleotide
tcgcgcgtttcggtgatgacggtgaaaacctctgacacatgcagctcccggagacggtcacagcttgtctgtaagcggatgccgggagcagacaagcccgtcagggcgcgtcagcgggtgttggcgggtgtcggggctggcttaactatgcggcatcagagcagattgtactgagagtgcaccatatgcggtgtgaaataccgcacagatgcgtaaggagaaaataccgcatcagattggctattggccattgcatacgttgtatccatatcataatatgtacatttatattggctcatgtccaacattaccgccatgttgacattgattattgactagttattaatagtaatcaattacggggtcattagttcatagcccatatatggagttccgcgttacataacttacggtaaatggcccgcctggctgaccgcccaacgacccccgcccattgacgtcaataatgacgtatgttcccatagtaacgccaatagggactttccattgacgtcaatgggtggagtatttacggtaaactgcccacttggcagtacatcaagtgtatcatatgccaagtacgccccctattgacgtcaatgacggtaaatggcccgcctggcattatgcccagtacatgaccttatgggactttcctacttggcagtacatctacgtattagtcatcgctattaccatggtgatgcggttttggcagtacatcaatgggcgtggatagcggtttgactcacggggatttccaagtctccaccccattgacgtcaatgggagtttgttttggcaccaaaatcaacgggactttccaaaatgtcgtaacaactccgccccattgacgcaaatgggcggtaggcgtgtacggtgggaggtctatataagcagagctcgtttagtgaaccgtcagatcgcctggagacgccatccacgctgttttgacctccatagaagacaccgggaccgatccagcctccatcggctcgcatctctccttcacgcgcccgccgccctacctgaggccgccatccacgccggttgagtcgcgttctgccgcctcccgcctgtggtgcctcctgaactgcgtccgccgtctaggtaagtttaaagctcaggtcgagaccgggcctttgtccggcgctcccttggagcctacctagactcagccggctctccacgctttgcctgaccctgcttgctcaactctagttaacggtggagggcagtgtagtctgagcagtactcgttgctgccgcgcgcgccaccagacataatagctgacagactaacagactgttcctttccatgggtcttttctgcagtcaccgtcctcgacacgtgtgatcagatatcgcggccgctctagacaccatgggctggtcttgtattatcctgtttctggtcgctaccgctactggcgtccattctcaggtccggctgtctcagtctggggggcagatgaagaaaccaggagactcaatgcggatcagctgcagagcttccggctacgagttcattaactgtcccatcaattggattcggctggcacccggcaagagacctgaatggatgggatggatgaaacctcgaggaggagcaggatctggcgctaggcagctgcagggacgagtgaccatgacacgagatatgtatagcgagaccgccttcctggaactgaggtctctgacaagtgacgatactgcagtctacttttgcaccaggggcaagtattgtacagcccgcgactactataactgggattttgagcactgggggcagggaactcccgtgaccgtcagctccccgtcgaccaagggcccatcggtcttccccctggcaccctcctccaagagcacctctgggggcacagcggccctgggctgcctggtcaaggactacttccccgaacccgtgacggtgtcgtggaactcaggcgccctgaccagcggcgtgcacaccttcccggctgtcctacagtcctcaggactctactccctcagcagcgtggtgaccgtgccctccagcagcttgggcacccagacctacatctgcaacgtgaatcacaagcccagcaacaccaaggtggacaagaaagttgagcccaaatcttgtgacaaaactcacacatgcccaccgtgcccagcacctgaactcctggggggaccgtcagtcttcctcttccccccaaaacccaaggacaccctcatgatctcccggacccctgaggtcacatgcgtggtggtggacgtgagccacgaagaccctgaggtcaagttcaactggtacgtggacggcgtggaggtgcataatgccaagacaaagccgcgggaggagcagtacaacagcacgtaccgtgtggtcagcgtcctcaccgtcctgcaccaggactggctgaatggcaaggagtacaagtgcaaggtctccaacaaagccctcccagcccccatcgagaaaaccatctccaaagccaaagggcagccccgagaaccacaggtgtacaccctgcccccatcccgggatgagctgaccaagaaccaggtcagcctgacctgcctggtcaaaggcttctatcccagcgacatcgccgtggagtgggagagcaatgggcagccggagaacaactacaagaccacgcctcccgtgctggactccgacggctccttcttcctctacagcaagctcaccgtggacaagagcaggtggcagcaggggaacgtcttctcatgctccgtgatgcatgaggctctgcacaaccactacacgcagaagagcctctccctgtctccgggtaaatgatgaggatccagatctgctgtgccttctagttgccagccatctgttgtttgcccctcccccgtgccttccttgaccctggaaggtgccactcccactgtcctttcctaataaaatgaggaaattgcatcgcattgtctgagtaggtgtcattctattctggggggtggggtggggcaggacagcaagggggaggattgggaagacaatagcaggcatgctggggatgcggtgggctctatgggtacccaggtgctgaagaattgacccggttcctcctgggccagaaagaagcaggcacatccccttctctgtgacacaccctgtccacgcccctggttcttagttccagccccactcataggacactcatagctcaggagggctccgccttcaatcccacccgctaaagtacttggagcggtctctccctccctcatcagcccaccaaaccaaacctagcctccaagagtgggaagaaattaaagcaagataggctattaagtgcagagggagagaaaatgcctccaacatgtgaggaagtaatgagagaaatcatagaattttaaggccatgatttaaggccatcatggccttaatcttccgcttcctcgctcactgactcgctgcgctcggtcgttcggctgcggcgagcggtatcagctcactcaaaggcggtaatacggttatccacagaatcaggggataacgcaggaaagaacatgtgagcaaaaggccagcaaaaggccaggaaccgtaaaaaggccgcgttgctggcgtttttccataggctccgcccccctgacgagcatcacaaaaatcgacgctcaagtcagaggtggcgaaacccgacaggactataaagataccaggcgtttccccctggaagctccctcgtgcgctctcctgttccgaccctgccgcttaccggatacctgtccgcctttctcccttcgggaagcgtggcgctttctcatagctcacgctgtaggtatctcagttcggtgtaggtcgttcgctccaagctgggctgtgtgcacgaaccccccgttcagcccgaccgctgcgccttatccggtaactatcgtcttgagtccaacccggtaagacacgacttatcgccactggcagcagccactggtaacaggattagcagagcgaggtatgtaggcggtgctacagagttcttgaagtggtggcctaactacggctacactagaagaacagtatttggtatctgcgctctgctgaagccagttaccttcggaaaaagagttggtagctcttgatccggcaaacaaaccaccgctggtagcggtggtttttttgtttgcaagcagcagattacgcgcagaaaaaaaggatctcaagaagatcctttgatcttttctacggggtctgacgctcagtggaacgaaaactcacgttaagggattttggtcatgagattatcaaaaaggatcttcacctagatccttttaaattaaaaatgaagttttaaatcaatctaaagtatatatgagtaaacttggtctgacagttaccaatgcttaatcagtgaggcacctatctcagcgatctgtctatttcgttcatccatagttgcctgactcggggggggggggcgctgaggtctgcctcgtgaagaaggtgttgctgactcataccaggcctgaatcgccccatcatccagccagaaagtgagggagccacggttgatgagagctttgttgtaggtggaccagttggtgattttgaacttttgctttgccacggaacggtctgcgttgtcgggaagatgcgtgatctgatccttcaactcagcaaaagttcgatttattcaacaaagccgccgtcccgtcaagtcagcgtaatgctctgccagtgttacaaccaattaaccaattctgattagaaaaactcatcgagcatcaaatgaaactgcaatttattcatatcaggattatcaataccatatttttgaaaaagccgtttctgtaatgaaggagaaaactcaccgaggcagttccataggatggcaagatcctggtatcggtctgcgattccgactcgtccaacatcaatacaacctattaatttcccctcgtcaaaaataaggttatcaagtgagaaatcaccatgagtgacgactgaatccggtgagaatggcaaaagcttatgcatttctttccagacttgttcaacaggccagccattacgctcgtcatcaaaatcactcgcatcaaccaaaccgttattcattcgtgattgcgcctgagcgagacgaaatacgcgatcgctgttaaaaggacaattacaaacaggaatcgaatgcaaccggcgcaggaacactgccagcgcatcaacaatattttcacctgaatcaggatattcttctaatacctggaatgctgttttcccggggatcgcagtggtgagtaaccatgcatcatcaggagtacggataaaatgcttgatggtcggaagaggcataaattccgtcagccagtttagtctgaccatctcatctgtaacatcattggcaacgctacctttgccatgtttcagaaacaactctggcgcatcgggcttcccatacaatcgatagattgtcgcacctgattgcccgacattatcgcgagcccatttatacccatataaatcagcatccatgttggaatttaatcgcggcctcgagcaagacgtttcccgttgaatatggctcataacaccccttgtattactgtttatgtaagcagacagttttattgttcatgatgatatatttttatcttgtgcaatgtaacatcagagattttgagacacaacgtggctttccccccccccccattattgaagcatttatcagggttattgtctcatgagcggatacatatttgaatgtatttagaaaaataaacaaataggggttccgcgcacatttccccgaaaagtgccacctgacgtctaagaaaccattattatcatgacattaacctataaaaataggcgtatcacgaggccctttcgtc

SEQ ID NO: 153 - DNA, 1425 bp, Artificial Sequence
  Description of Artificial Sequence: Synthetic polynucleotide
atgggatggtcatgtatcatcctttttctagtagcaactgcaaccggtgtacattcccaagtgcgactgtcgcagtctggaggtcagatgaagaagcctggcgagtcgatgagactttcctgtcgggcttccggatatgaatttctgaattgtccaataaattggattcgcctggcccccggaagacggcctgagtggatgggatggctgaagcctaggtttggggccgtcaattacgcacgtaaatttcagggcagagtgaccatgactcgagacgtgtattccgacacagcctttttggagttgcgctccttgacatcagacgacacggccgtctatttttgtactaggggaaaatattgtactgcgcgcgactattataattgggacttcgaacactggggccggggtgccccggtcaccgtctcgtcagcgtcgaccaagggcccatcggtcttccccctggcaccctcctccaagagcacctctgggggcacagcggccctgggctgcctggtcaaggactacttccccgaacccgtgacggtgtcgtggaactcaggcgccctgaccagcggcgtgcacaccttcccggctgtcctacagtcctcaggactctactccctcagcagcgtggtgaccgtgccctccagcagcttgggcacccagacctacatctgcaacgtgaatcacaagcccagcaacaccaaggtggacaagaaagttgagcccaaatcttgtgacaaaactcacacatgcccaccgtgcccagcacctgaactcctggggggaccgtcagtcttcctcttccccccaaaacccaaggacaccctcatgatctcccggacccctgaggtcacatgcgtggtggtggacgtgagccacgaagaccctgaggtcaagttcaactggtacgtggacggcgtggaggtgcataatgccaagacaaagccgcgggaggagcagtacaacagcacgtaccgtgtggtcagcgtcctcaccgtcctgcaccaggactggctgaatggcaaggagtacaagtgcaaggtctccaacaaagccctcccagcccccatcgagaaaaccatctccaaagccaaagggcagccccgagaaccacaggtgtacaccctgcccccatcccgggatgagctgaccaagaaccaggtcagcctgacctgcctggtcaaaggcttctatcccagcgacatcgccgtggagtgggagagcaatgggcagccggagaacaactacaagaccacgcctcccgtgctggactccgacggctccttcttcctctacagcaagctcaccgtggacaagagcaggtggcagcaggggaacgtcttctcatgctccgtgatgcatgaggctctgcacaaccactacacgcagaagagcctctccctgtctccgggtaaatga

SEQ ID NO: 154 - DNA, 5838 bp, Artificial Sequence
  Description of Artificial Sequence: Synthetic polynucleotide
tcgcgcgtttcggtgatgacggtgaaaacctctgacacatgcagctcccggagacggtcacagcttgtctgtaagcggatgccgggagcagacaagcccgtcagggcgcgtcagcgggtgttggcgggtgtcggggctggcttaactatgcggcatcagagcagattgtactgagagtgcaccatatgcggtgtgaaataccgcacagatgcgtaaggagaaaataccgcatcagattggctattggccattgcatacgttgtatccatatcataatatgtacatttatattggctcatgtccaacattaccgccatgttgacattgattattgactagttattaatagtaatcaattacggggtcattagttcatagcccatatatggagttccgcgttacataacttacggtaaatggcccgcctggctgaccgcccaacgacccccgcccattgacgtcaataatgacgtatgttcccatagtaacgccaatagggactttccattgacgtcaatgggtggagtatttacggtaaactgcccacttggcagtacatcaagtgtatcatatgccaagtacgccccctattgacgtcaatgacggtaaatggcccgcctggcattatgcccagtacatgaccttatgggactttcctacttggcagtacatctacgtattagtcatcgctattaccatggtgatgcggttttggcagtacatcaatgggcgtggatagcggtttgactcacggggatttccaagtctccaccccattgacgtcaatgggagtttgttttggcaccaaaatcaacgggactttccaaaatgtcgtaacaactccgccccattgacgcaaatgggcggtaggcgtgtacggtgggaggtctatataagcagagctcgtttagtgaaccgtcagatcgcctggagacgccatccacgctgttttgacctccatagaagacaccgggaccgatccagcctccatcggctcgcatctctccttcacgcgcccgccgccctacctgaggccgccatccacgccggttgagtcgcgttctgccgcctcccgcctgtggtgcctcctgaactgcgtccgccgtctaggtaagtttaaagctcaggtcgagaccgggcctttgtccggcgctcccttggagcctacctagactcagccggctctccacgctttgcctgaccctgcttgctcaactctagttaacggtggagggcagtgtagtctgagcagtactcgttgctgccgcgcgcgccaccagacataatagctgacagactaacagactgttcctttccatgggtcttttctgcagtcaccgtcgtcgacacgtgtgatcagatatcgcggccgctctagaccaccatgggatggtcatgtatcatcctttttctagtagcaactgcaaccggtgtacattcccaagtgcgactgtcgcagtctggaggtcagatgaagaagcctggcgagtcgatgagactttcctgtcgggcttccggatatgaatttctgaattgtccaataaattggattcgcctggcccccggaagacggcctgagtggatgggatggctgaagcctaggtttggggccgtcaattacgcacgtaaatttcagggcagagtgaccatgactcgagacgtgtattccgacacagcctttttggagttgcgctccttgacatcagacgacacggccgtctatttttgtactaggggaaaatattgtactgcgcgcgactattataattgggacttcgaacactggggccggggtgccccggtcaccgtctcgtcagcgtcgaccaagggcccatcggtcttccccctggcaccctcctccaagagcacctctgggggcacagcggccctgggctgcctggtcaaggactacttccccgaacccgtgacggtgtcgtggaactcaggcgccctgaccagcggcgtgcacaccttcccggctgtcctacagtcctcaggactctactccctcagcagcgtggtgaccgtgccctccagcagcttgggcacccagacctacatctgcaacgtgaatcacaagcccagcaacaccaaggtggacaagaaagttgagcccaaatcttgtgacaaaactcacacatgcccaccgtgcccagcacctgaactcctggggggaccgtcagtcttcctcttccccccaaaacccaaggacaccctcatgatctcccggacccctgaggtcacatgcgtggtggtggacgtgagccacgaagaccctgaggtcaagttcaactggtacgtggacggcgtggaggtgcataatgccaagacaaagccgcgggaggagcagtacaacagcacgtaccgtgtggtcagcgtcctcaccgtcctgcaccaggactggctgaatggcaaggagtacaagtgcaaggtctccaacaaagccctcccagcccccatcgagaaaaccatctccaaagccaaagggcagccccgagaaccacaggtgtacaccctgcccccatcccgggatgagctgaccaagaaccaggtcagcctgacctgcctggtcaaaggcttctatcccagcgacatcgccgtggagtgggagagcaatgggcagccggagaacaactacaagaccacgcctcccgtgctggactccgacggctccttcttcctctacagcaagctcaccgtggacaagagcaggtggcagcaggggaacgtcttctcatgctccgtgatgcatgaggctctgcacaaccactacacgcagaagagcctctccctgtctccgggtaaatgatgaggatccagatctgctgtgccttctagttgccagccatctgttgtttgcccctcccccgtgccttccttgaccctggaaggtgccactcccactgtcctttcctaataaaatgaggaaattgcatcgcattgtctgagtaggtgtcattctattctggggggtggggtggggcaggacagcaagggggaggattgggaagacaatagcaggcatgctggggatgcggtgggctctatgggtacccaggtgctgaagaattgacccggttcctcctgggccagaaagaagcaggcacatccccttctctgtgacacaccctgtccacgcccctggttcttagttccagccccactcataggacactcatagctcaggagggctccgccttcaatcccacccgctaaagtacttggagcggtctctccctccctcatcagcccaccaaaccaaacctagcctccaagagtgggaagaaattaaagcaagataggctattaagtgcagagggagagaaaatgcctccaacatgtgaggaagtaatgagagaaatcatagaattttaaggccatgatttaaggccatcatggccttaatcttccgcttcctcgctcactgactcgctgcgctcggtcgttcggctgcggcgagcggtatcagctcactcaaaggcggtaatacggttatccacagaatcaggggataacgcaggaaagaacatgtgagcaaaaggccagcaaaaggccaggaaccgtaaaaaggccgcgttgctggcgtttttccataggctccgcccccctgacgagcatcacaaaaatcgacgctcaagtcagaggtggcgaaacccgacaggactataaagataccaggcgtttccccctggaagctccctcgtgcgctctcctgttccgaccctgccgcttaccggatacctgtccgcctttctcccttcgggaagcgtggcgctttctcatagctcacgctgtaggtatctcagttcggtgtaggtcgttcgctccaagctgggctgtgtgcacgaaccccccgttcagcccgaccgctgcgccttatccggtaactatcgtcttgagtccaacccggtaagacacgacttatcgccactggcagcagccactggtaacaggattagcagagcgaggtatgtaggcggtgctacagagttcttgaagtggtggcctaactacggctacactagaagaacagtatttggtatctgcgctctgctgaagccagttaccttcggaaaaagagttggtagctcttgatccggcaaacaaaccaccgctggtagcggtggtttttttgtttgcaagcagcagattacgcgcagaaaaaaaggatctcaagaagatcctttgatcttttctacggggtctgacgctcagtggaacgaaaactcacgttaagggattttggtcatgagattatcaaaaaggatcttcacctagatccttttaaattaaaaatgaagttttaaatcaatctaaagtatatatgagtaaacttggtctgacagttaccaatgcttaatcagtgaggcacctatctcagcgatctgtctatttcgttcatccatagttgcctgactcggggggggggggcgctgaggtctgcctcgtgaagaaggtgttgctgactcataccaggcctgaatcgccccatcatccagccagaaagtgagggagccacggttgatgagagctttgttgtaggtggaccagttggtgattttgaacttttgctttgccacggaacggtctgcgttgtcgggaagatgcgtgatctgatccttcaactcagcaaaagttcgatttattcaacaaagccgccgtcccgtcaagtcagcgtaatgctctgccagtgttacaaccaattaaccaattctgattagaaaaactcatcgagcatcaaatgaaactgcaatttattcatatcaggattatcaataccatatttttgaaaaagccgtttctgtaatgaaggagaaaactcaccgaggcagttccataggatggcaagatcctggtatcggtctgcgattccgactcgtccaacatcaatacaacctattaatttcccctcgtcaaaaataaggttatcaagtgagaaatcaccatgagtgacgactgaatccggtgagaatggcaaaagcttatgcatttctttccagacttgttcaacaggccagccattacgctcgtcatcaaaatcactcgcatcaaccaaaccgttattcattcgtgattgcgcctgagcgagacgaaatacgcgatcgctgttaaaaggacaattacaaacaggaatcgaatgcaaccggcgcaggaacactgccagcgcatcaacaatattttcacctgaatcaggatattcttctaatacctggaatgctgttttcccggggatcgcagtggtgagtaaccatgcatcatcaggagtacggataaaatgcttgatggtcggaagaggcataaattccgtcagccagtttagtctgaccatctcatctgtaacatcattggcaacgctacctttgccatgtttcagaaacaactctggcgcatcgggcttcccatacaatcgatagattgtcgcacctgattgcccgacattatcgcgagcccatttatacccatataaatcagcatccatgttggaatttaatcgcggcctcgagcaagacgtttcccgttgaatatggctcataacaccccttgtattactgtttatgtaagcagacagttttattgttcatgatgatatatttttatcttgtgcaatgtaacatcagagattttgagacacaacgtggctttccccccccccccattattgaagcatttatcagggttattgtctcatgagcggatacatatttgaatgtatttagaaaaataaacaaataggggttccgcgcacatttccccgaaaagtgccacctgacgtctaagaaaccattattatcatgacattaacctataaaaataggcgtatcacgaggccctttcgtc

SEQ ID NO: 155 - DNA, 1425 bp, Artificial Sequence
  Description of Artificial Sequence: Synthetic polynucleotide
atgggatggtcatgtatcatcctttttctagtagcaactgcaaccggtgtacattcccaagtgcgactgtcgcagtctggaggtcagatgaagaagcctggcgagtcgatgagactttcctgtcgggcttccggatatgaatttctgaattgtccaataaattggattcgcctggcccccggaagacggcctgagtggatgggatggctgaagcctaggtggggggccgtcaattacgcacgtaaatttcagggcagagtgaccatgactcgagacgtgtattccgacacagcctttttggagttgcgctccttgacatcagacgacacggccgtctatttttgtactaggggaaaatattgtactgcgcgcgactattataattgggacttcgaacactggggccggggtgccccggtcaccgtctcgtcagcgtcgaccaagggcccatcggtcttccccctggcaccctcctccaagagcacctctgggggcacagcggccctgggctgcctggtcaaggactacttccccgaacccgtgacggtgtcgtggaactcaggcgccctgaccagcggcgtgcacaccttcccggctgtcctacagtcctcaggactctactccctcagcagcgtggtgaccgtgccctccagcagcttgggcacccagacctacatctgcaacgtgaatcacaagcccagcaacaccaaggtggacaagaaagttgagcccaaatcttgtgacaaaactcacacatgcccaccgtgcccagcacctgaactcctggggggaccgtcagtcttcctcttccccccaaaacccaaggacaccctcatgatctcccggacccctgaggtcacatgcgtggtggtggacgtgagccacgaagaccctgaggtcaagttcaactggtacgtggacggcgtggaggtgcataatgccaagacaaagccgcgggaggagcagtacaacagcacgtaccgtgtggtcagcgtcctcaccgtcctgcaccaggactggctgaatggcaaggagtacaagtgcaaggtctccaacaaagccctcccagcccccatcgagaaaaccatctccaaagccaaagggcagccccgagaaccacaggtgtacaccctgcccccatcccgggatgagctgaccaagaaccaggtcagcctgacctgcctggtcaaaggcttctatcccagcgacatcgccgtggagtgggagagcaatgggcagccggagaacaactacaagaccacgcctcccgtgctggactccgacggctccttcttcctctacagcaagctcaccgtggacaagagcaggtggcagcaggggaacgtcttctcatgctccgtgatgcatgaggctctgcacaaccactacacgcagaagagcctctccctgtctccgggtaaatga

SEQ ID NO: 156 - DNA, 5838 bp, Artificial Sequence
  Description of Artificial Sequence: Synthetic polynucleotide
tcgcgcgtttcggtgatgacggtgaaaacctctgacacatgcagctcccggagacggtcacagcttgtctgtaagcggatgccgggagcagacaagcccgtcagggcgcgtcagcgggtgttggcgggtgtcggggctggcttaactatgcggcatcagagcagattgtactgagagtgcaccatatgcggtgtgaaataccgcacagatgcgtaaggagaaaataccgcatcagattggctattggccattgcatacgttgtatccatatcataatatgtacatttatattggctcatgtccaacattaccgccatgttgacattgattattgactagttattaatagtaatcaattacggggtcattagttcatagcccatatatggagttccgcgttacataacttacggtaaatggcccgcctggctgaccgcccaacgacccccgcccattgacgtcaataatgacgtatgttcccatagtaacgccaatagggactttccattgacgtcaatgggtggagtatttacggtaaactgcccacttggcagtacatcaagtgtatcatatgccaagtacgccccctattgacgtcaatgacggtaaatggcccgcctggcattatgcccagtacatgaccttatgggactttcctacttggcagtacatctacgtattagtcatcgctattaccatggtgatgcggttttggcagtacatcaatgggcgtggatagcggtttgactcacggggatttccaagtctccaccccattgacgtcaatgggagtttgttttggcaccaaaatcaacgggactttccaaaatgtcgtaacaactccgccccattgacgcaaatgggcggtaggcgtgtacggtgggaggtctatataagcagagctcgtttagtgaaccgtcagatcgcctggagacgccatccacgctgttttgacctccatagaagacaccgggaccgatccagcctccatcggctcgcatctctccttcacgcgcccgccgccctacctgaggccgccatccacgccggttgagtcgcgttctgccgcctcccgcctgtggtgcctcctgaactgcgtccgccgtctaggtaagtttaaagctcaggtcgagaccgggcctttgtccggcgctcccttggagcctacctagactcagccggctctccacgctttgcctgaccctgcttgctcaactctagttaacggtggagggcagtgtagtctgagcagtactcgttgctgccgcgcgcgccaccagacataatagctgacagactaacagactgttcctttccatgggtcttttctgcagtcaccgtcgtcgacacgtgtgatcagatatcgcggccgctctagaccaccatgggatggtcatgtatcatcctttttctagtagcaactgcaaccggtgtacattcccaagtgcgactgtcgcagtctggaggtcagatgaagaagcctggcgagtcgatgagactttcctgtcgggcttccggatatgaatttctgaattgtccaataaattggattcgcctggcccccggaagacggcctgagtggatgggatggctgaagcctaggtggggggccgtcaattacgcacgtaaatttcagggcagagtgaccatgactcgagacgtgtattccgacacagcctttttggagttgcgctccttgacatcagacgacacggccgtctatttttgtactaggggaaaatattgtactgcgcgcgactattataattgggacttcgaacactggggccggggtgccccggtcaccgtctcgtcagcgtcgaccaagggcccatcggtcttccccctggcaccctcctccaagagcacctctgggggcacagcggccctgggctgcctggtcaaggactacttccccgaacccgtgacggtgtcgtggaactcaggcgccctgaccagcggcgtgcacaccttcccggctgtcctacagtcctcaggactctactccctcagcagcgtggtgaccgtgccctccagcagcttgggcacccagacctacatctgcaacgtgaatcacaagcccagcaacaccaaggtggacaagaaagttgagcccaaatcttgtgacaaaactcacacatgcccaccgtgcccagcacctgaactcctggggggaccgtcagtcttcctcttccccccaaaacccaaggacaccctcatgatctcccggacccctgaggtcacatgcgtggtggtggacgtgagccacgaagaccctgaggtcaagttcaactggtacgtggacggcgtggaggtgcataatgccaagacaaagccgcgggaggagcagtacaacagcacgtaccgtgtggtcagcgtcctcaccgtcctgcaccaggactggctgaatggcaaggagtacaagtgcaaggtctccaacaaagccctcccagcccccatcgagaaaaccatctccaaagccaaagggcagccccgagaaccacaggtgtacaccctgcccccatcccgggatgagctgaccaagaaccaggtcagcctgacctgcctggtcaaaggcttctatcccagcgacatcgccgtggagtgggagagcaatgggcagccggagaacaactacaagaccacgcctcccgtgctggactccgacggctccttcttcctctacagcaagctcaccgtggacaagagcaggtggcagcaggggaacgtcttctcatgctccgtgatgcatgaggctctgcacaaccactacacgcagaagagcctctccctgtctccgggtaaatgatgaggatccagatctgctgtgccttctagttgccagccatctgttgtttgcccctcccccgtgccttccttgaccctggaaggtgccactcccactgtcctttcctaataaaatgaggaaattgcatcgcattgtctgagtaggtgtcattctattctggggggtggggtggggcaggacagcaagggggaggattgggaagacaatagcaggcatgctggggatgcggtgggctctatgggtacccaggtgctgaagaattgacccggttcctcctgggccagaaagaagcaggcacatccccttctctgtgacacaccctgtccacgcccctggttcttagttccagccccactcataggacactcatagctcaggagggctccgccttcaatcccacccgctaaagtacttggagcggtctctccctccctcatcagcccaccaaaccaaacctagcctccaagagtgggaagaaattaaagcaagataggctattaagtgcagagggagagaaaatgcctccaacatgtgaggaagtaatgagagaaatcatagaattttaaggccatgatttaaggccatcatggccttaatcttccgcttcctcgctcactgactcgctgcgctcggtcgttcggctgcggcgagcggtatcagctcactcaaaggcggtaatacggttatccacagaatcaggggataacgcaggaaagaacatgtgagcaaaaggccagcaaaaggccaggaaccgtaaaaaggccgcgttgctggcgtttttccataggctccgcccccctgacgagcatcacaaaaatcgacgctcaagtcagaggtggcgaaacccgacaggactataaagataccaggcgtttccccctggaagctccctcgtgcgctctcctgttccgaccctgccgcttaccggatacctgtccgcctttctcccttcgggaagcgtggcgctttctcatagctcacgctgtaggtatctcagttcggtgtaggtcgttcgctccaagctgggctgtgtgcacgaaccccccgttcagcccgaccgctgcgccttatccggtaactatcgtcttgagtccaacccggtaagacacgacttatcgccactggcagcagccactggtaacaggattagcagagcgaggtatgtaggcggtgctacagagttcttgaagtggtggcctaactacggctacactagaagaacagtatttggtatctgcgctctgctgaagccagttaccttcggaaaaagagttggtagctcttgatccggcaaacaaaccaccgctggtagcggtggtttttttgtttgcaagcagcagattacgcgcagaaaaaaaggatctcaagaagatcctttgatcttttctacggggtctgacgctcagtggaacgaaaactcacgttaagggattttggtcatgagattatcaaaaaggatcttcacctagatccttttaaattaaaaatgaagttttaaatcaatctaaagtatatatgagtaaacttggtctgacagttaccaatgcttaatcagtgaggcacctatctcagcgatctgtctatttcgttcatccatagttgcctgactcggggggggggggcgctgaggtctgcctcgtgaagaaggtgttgctgactcataccaggcctgaatcgccccatcatccagccagaaagtgagggagccacggttgatgagagctttgttgtaggtggaccagttggtgattttgaacttttgctttgccacggaacggtctgcgttgtcgggaagatgcgtgatctgatccttcaactcagcaaaagttcgatttattcaacaaagccgccgtcccgtcaagtcagcgtaatgctctgccagtgttacaaccaattaaccaattctgattagaaaaactcatcgagcatcaaatgaaactgcaatttattcatatcaggattatcaataccatatttttgaaaaagccgtttctgtaatgaaggagaaaactcaccgaggcagttccataggatggcaagatcctggtatcggtctgcgattccgactcgtccaacatcaatacaacctattaatttcccctcgtcaaaaataaggttatcaagtgagaaatcaccatgagtgacgactgaatccggtgagaatggcaaaagcttatgcatttctttccagacttgttcaacaggccagccattacgctcgtcatcaaaatcactcgcatcaaccaaaccgttattcattcgtgattgcgcctgagcgagacgaaatacgcgatcgctgttaaaaggacaattacaaacaggaatcgaatgcaaccggcgcaggaacactgccagcgcatcaacaatattttcacctgaatcaggatattcttctaatacctggaatgctgttttcccggggatcgcagtggtgagtaaccatgcatcatcaggagtacggataaaatgcttgatggtcggaagaggcataaattccgtcagccagtttagtctgaccatctcatctgtaacatcattggcaacgctacctttgccatgtttcagaaacaactctggcgcatcgggcttcccatacaatcgatagattgtcgcacctgattgcccgacattatcgcgagcccatttatacccatataaatcagcatccatgttggaatttaatcgcggcctcgagcaagacgtttcccgttgaatatggctcataacaccccttgtattactgtttatgtaagcagacagttttattgttcatgatgatatatttttatcttgtgcaatgtaacatcagagattttgagacacaacgtggctttccccccccccccattattgaagcatttatcagggttattgtctcatgagcggatacatatttgaatgtatttagaaaaataaacaaataggggttccgcgcacatttccccgaaaagtgccacctgacgtctaagaaaccattattatcatgacattaacctataaaaataggcgtatcacgaggccctttcgtc

SEQ ID NO: 157 - DNA, 690 bp, Artificial Sequence; identical to SEQ ID NO: 135
  Description of Artificial Sequence: Synthetic polynucleotide

SEQ ID NO: 158 - DNA, 5102 bp, Artificial Sequence; identical to SEQ ID NO: 136
  Description of Artificial Sequence: Synthetic polynucleotide

SEQ ID NO: 159 - DNA, 690 bp, Artificial Sequence; identical to SEQ ID NO: 137
  Description of Artificial Sequence: Synthetic polynucleotide

SEQ ID NO: 160 - DNA, 5102 bp, Artificial Sequence; identical to SEQ ID NO: 138
  Description of Artificial Sequence: Synthetic polynucleotide

SEQ ID NO: 161 - DNA, 1413 bp, Artificial Sequence
  Description of Artificial Sequence: Synthetic polynucleotide
atgggatggtcatgtatcatcctttttctagtagcaactgcaaccggtgtacattcccaggtgcagctggtgcagtctggaggtcagatgaagaagcctggcgagtcgatgagaatttcttgtcgggcttctggatatgaatttattgattgtacgctaaattggattcgtctggcccccggaaaaaggcctgagtggatgggatggctgaagcctcggttcggggccgtcaactacgcacgtccacttcagggcagagtgaccatgactcgagacgtttattccgacacagcctttttggagctgcgctcgttgacagtagacgacacggccgtctacttttgtactaggggaaaaaactgtgattacaattgggacttcgaacactggggccggggcaccccggtcatcgtctcatcaccgtcgaccaagggcccatcggtcttccccctggcaccctcctccaagagcacctctgggggcacagcggccctgggctgcctggtcaaggactacttccccgaaccggtgacggtgtcgtggaactcaggcgccctgaccagcggcgtgcacaccttcccggctgtcctacagtcctcaggactctactccctcagcagcgtggtgaccgtgccctccagcagcttgggcacccagacctacatctgcaacgtgaatcacaagcccagcaacaccaaggtggacaagaaagttgagcccaaatcttgtgacaaaactcacacatgcccaccgtgcccagcacctgaactcctggggggaccgtcagtcttcctcttccccccaaaacccaaggacaccctcatgatctcccggacccctgaggtcacatgcgtggtggtggacgtgagccacgaagaccctgaggtcaagttcaactggtacgtggacggcgtggaggtgcataatgccaagacaaagccgcgggaggagcagtacaacagcacgtaccgtgtggtcagcgtcctcaccgtcctgcaccaggactggctgaatggcaaggagtacaagtgcaaggtctccaacaaagccctcccagcccccatcgagaaaaccatctccaaagccaaagggcagccccgagaaccacaggtgtacaccctgcccccatcccgggatgagctgaccaagaaccaggtcagcctgacctgcctggtcaaaggcttctatcccagcgacatcgccgtggagtgggagagcaatgggcagccggagaacaactacaagaccacgcctcccgtgctggactccgacggctccttcttcctctacagcaagctcaccgtggacaagagcaggtggcagcaggggaacgtcttctcatgctccgtgatgcatgaggctctgcacaaccactacacgcagaagagcctctccctgtctccgggtaaatga

SEQ ID NO: 162 - DNA, 5826 bp, Artificial Sequence
  Description of Artificial Sequence: Synthetic polynucleotide
tcgcgcgtttcggtgatgacggtgaaaacctctgacacatgcagctcccggagacggtcacagcttgtctgtaagcggatgccgggagcagacaagcccgtcagggcgcgtcagcgggtgttggcgggtgtcggggctggcttaactatgcggcatcagagcagattgtactgagagtgcaccatatgcggtgtgaaataccgcacagatgcgtaaggagaaaataccgcatcagattggctattggccattgcatacgttgtatccatatcataatatgtacatttatattggctcatgtccaacattaccgccatgttgacattgattattgactagttattaatagtaatcaattacggggtcattagttcatagcccatatatggagttccgcgttacataacttacggtaaatggcccgcctggctgaccgcccaacgacccccgcccattgacgtcaataatgacgtatgttcccatagtaacgccaatagggactttccattgacgtcaatgggtggagtatttacggtaaactgcccacttggcagtacatcaagtgtatcatatgccaagtacgccccctattgacgtcaatgacggtaaatggcccgcctggcattatgcccagtacatgaccttatgggactttcctacttggcagtacatctacgtattagtcatcgctattaccatggtgatgcggttttggcagtacatcaatgggcgtggatagcggtttgactcacggggatttccaagtctccaccccattgacgtcaatgggagtttgttttggcaccaaaatcaacgggactttccaaaatgtcgtaacaactccgccccattgacgcaaatgggcggtaggcgtgtacggtgggaggtctatataagcagagctcgtttagtgaaccgtcagatcgcctggagacgccatccacgctgttttgacctccatagaagacaccgggaccgatccagcctccatcggctcgcatctctccttcacgcgcccgccgccctacctgaggccgccatccacgccggttgagtcgcgttctgccgcctcccgcctgtggtgcctcctgaactgcgtccgccgtctaggtaagtttaaagctcaggtcgagaccgggcctttgtccggcgctcccttggagcctacctagactcagccggctctccacgctttgcctgaccctgcttgctcaactctagttaacggtggagggcagtgtagtctgagcagtactcgttgctgccgcgcgcgccaccagacataatagctgacagactaacagactgttcctttccatgggtcttttctgcagtcaccgtcgtcgacacgtgtgatcagatatcgcggccgctctagaccaccatgggatggtcatgtatcatcctttttctagtagcaactgcaaccggtgtacattcccaggtgcagctggtgcagtctggaggtcagatgaagaagcctggcgagtcgatgagaatttcttgtcgggcttctggatatgaatttattgattgtacgctaaattggattcgtctggcccccggaaaaaggcctgagtggatgggatggctgaagcctcggttcggggccgtcaactacgcacgtccacttcagggcagagtgaccatgactcgagacgtttattccgacacagcctttttggagctgcgctcgttgacagtagacgacacggccgtctacttttgtactaggggaaaaaactgtgattacaattgggacttcgaacactggggccggggcaccccggtcatcgtctcatcaccgtcgaccaagggcccatcggtcttccccctggcaccctcctccaagagcacctctgggggcacagcggccctgggctgcctggtcaaggactacttccccgaaccggtgacggtgtcgtggaactcaggcgccctgaccagcggcgtgcacaccttcccggctgtcctacagtcctcaggactctactccctcagcagcgtggtgaccgtgccctccagcagcttgggcacccagacctacatctgcaacgtgaatcacaagcccagcaacaccaaggtggacaagaaagttgagcccaaatcttgtgacaaaactcacacatgcccaccgtgcccagcacctgaactcctggggggaccgtcagtcttcctcttccccccaaaacccaaggacaccctcatgatctcccggacccctgaggtcacatgcgtggtggtggacgtgagccacgaagaccctgaggtcaagttcaactggtacgtggacggcgtggaggtgcataatgccaagacaaagccgcgggaggagcagtacaacagcacgtaccgtgtggtcagcgtcctcaccgtcctgcaccaggactggctgaatggcaaggagtacaagtgcaaggtctccaacaaagccctcccagcccccatcgagaaaaccatctccaaagccaaagggcagccccgagaaccacaggtgtacaccctgcccccatcccgggatgagctgaccaagaaccaggtcagcctgacctgcctggtcaaaggcttctatcccagcgacatcgccgtggagtgggagagcaatgggcagccggagaacaactacaagaccacgcctcccgtgctggactccgacggctccttcttcctctacagcaagctcaccgtggacaagagcaggtggcagcaggggaacgtcttctcatgctccgtgatgcatgaggctctgcacaaccactacacgcagaagagcctctccctgtctccgggtaaatgatgaggatccagatctgctgtgccttctagttgccagccatctgttgtttgcccctcccccgtgccttccttgaccctggaaggtgccactcccactgtcctttcctaataaaatgaggaaattgcatcgcattgtctgagtaggtgtcattctattctggggggtggggtggggcaggacagcaagggggaggattgggaagacaatagcaggcatgctggggatgcggtgggctctatgggtacccaggtgctgaagaattgacccggttcctcctgggccagaaagaagcaggcacatccccttctctgtgacacaccctgtccacgcccctggttcttagttccagccccactcataggacactcatagctcaggagggctccgccttcaatcccacccgctaaagtacttggagcggtctctccctccctcatcagcccaccaaaccaaacctagcctccaagagtgggaagaaattaaagcaagataggctattaagtgcagagggagagaaaatgcctccaacatgtgaggaagtaatgagagaaatcatagaattttaaggccatgatttaaggccatcatggccttaatcttccgcttcctcgctcactgactcgctgcgctcggtcgttcggctgcggcgagcggtatcagctcactcaaaggcggtaatacggttatccacagaatcaggggataacgcaggaaagaacatgtgagcaaaaggccagcaaaaggccaggaaccgtaaaaaggccgcgttgctggcgtttttccataggctccgcccccctgacgagcatcacaaaaatcgacgctcaagtcagaggtggcgaaacccgacaggactataaagataccaggcgtttccccctggaagctccctcgtgcgctctcctgttccgaccctgccgcttaccggatacctgtccgcctttctcccttcgggaagcgtggcgctttctcatagctcacgctgtaggtatctcagttcggtgtaggtcgttcgctccaagctgggctgtgtgcacgaaccccccgttcagcccgaccgctgcgccttatccggtaactatcgtcttgagtccaacccggtaagacacgacttatcgccactggcagcagccactggtaacaggattagcagagcgaggtatgtaggcggtgctacagagttcttgaagtggtggcctaactacggctacactagaagaacagtatttggtatctgcgctctgctgaagccagttaccttcggaaaaagagttggtagctcttgatccggcaaacaaaccaccgctggtagcggtggtttttttgtttgcaagcagcagattacgcgcagaaaaaaaggatctcaagaagatcctttgatcttttctacggggtctgacgctcagtggaacgaaaactcacgttaagggattttggtcatgagattatcaaaaaggatcttcacctagatccttttaaattaaaaatgaagttttaaatcaatctaaagtatatatgagtaaacttggtctgacagttaccaatgcttaatcagtgaggcacctatctcagcgatctgtctatttcgttcatccatagttgcctgactcggggggggggggcgctgaggtctgcctcgtgaagaaggtgttgctgactcataccaggcctgaatcgccccatcatccagccagaaagtgagggagccacggttgatgagagctttgttgtaggtggaccagttggtgattttgaacttttgctttgccacggaacggtctgcgttgtcgggaagatgcgtgatctgatccttcaactcagcaaaagttcgatttattcaacaaagccgccgtcccgtcaagtcagcgtaatgctctgccagtgttacaaccaattaaccaattctgattagaaaaactcatcgagcatcaaatgaaactgcaatttattcatatcaggattatcaataccatatttttgaaaaagccgtttctgtaatgaaggagaaaactcaccgaggcagttccataggatggcaagatcctggtatcggtctgcgattccgactcgtccaacatcaatacaacctattaatttcccctcgtcaaaaataaggttatcaagtgagaaatcaccatgagtgacgactgaatccggtgagaatggcaaaagcttatgcatttctttccagacttgttcaacaggccagccattacgctcgtcatcaaaatcactcgcatcaaccaaaccgttattcattcgtgattgcgcctgagcgagacgaaatacgcgatcgctgttaaaaggacaattacaaacaggaatcgaatgcaaccggcgcaggaacactgccagcgcatcaacaatattttcacctgaatcaggatattcttctaatacctggaatgctgttttcccggggatcgcagtggtgagtaaccatgcatcatcaggagtacggataaaatgcttgatggtcggaagaggcataaattccgtcagccagtttagtctgaccatctcatctgtaacatcattggcaacgctacctttgccatgtttcagaaacaactctggcgcatcgggcttcccatacaatcgatagattgtcgcacctgattgcccgacattatcgcgagcccatttatacccatataaatcagcatccatgttggaatttaatcgcggcctcgagcaagacgtttcccgttgaatatggctcataacaccccttgtattactgtttatgtaagcagacagttttattgttcatgatgatatatttttatcttgtgcaatgtaacatcagagattttgagacacaacgtggctttccccccccccccattattgaagcatttatcagggttattgtctcatgagcggatacatatttgaatgtatttagaaaaataaacaaataggggttccgcgcacatttccccgaaaagtgccacctgacgtctaagaaaccattattatcatgacattaacctataaaaataggcgtatcacgaggccctttcgtc

SEQ ID NO: 163 - DNA, 1413 bp, Artificial Sequence
  Description of Artificial Sequence: Synthetic polynucleotide
atgggatggtcatgtatcatcctttttctagtagcaactgcaaccggtgtacattcccaggtgcagctggtgcagtctggaggtcagatgaagaagcctggcgagtcgatgagaatttcttgtcgggcttctggatatgaatttattgattgtacgctaaattggattcgtctggcccccggaaaaaggcctgagtggatgggatggctgaagcctcggtggggggccgtcaactacgcacgtccacttcagggcagagtgaccatgactcgagacgtttattccgacacagcctttttggagctgcgctcgttgacagtagacgacacggccgtctacttttgtactaggggaaaaaactgtgattacaattgggacttcgaacactggggccggggcaccccggtcatcgtctcatcaccgtcgaccaagggcccatcggtcttccccctggcaccctcctccaagagcacctctgggggcacagcggccctgggctgcctggtcaaggactacttccccgaaccggtgacggtgtcgtggaactcaggcgccctgaccagcggcgtgcacaccttcccggctgtcctacagtcctcaggactctactccctcagcagcgtggtgaccgtgccctccagcagcttgggcacccagacctacatctgcaacgtgaatcacaagcccagcaacaccaaggtggacaagaaagttgagcccaaatcttgtgacaaaactcacacatgcccaccgtgcccagcacctgaactcctggggggaccgtcagtcttcctcttccccccaaaacccaaggacaccctcatgatctcccggacccctgaggtcacatgcgtggtggtggacgtgagccacgaagaccctgaggtcaagttcaactggtacgtggacggcgtggaggtgcataatgccaagacaaagccgcgggaggagcagtacaacagcacgtaccgtgtggtcagcgtcctcaccgtcctgcaccaggactggctgaatggcaaggagtacaagtgcaaggtctccaacaaagccctcccagcccccatcgagaaaaccatctccaaagccaaagggcagccccgagaaccacaggtgtacaccctgcccccatcccgggatgagctgaccaagaaccaggtcagcctgacctgcctggtcaaaggcttctatcccagcgacatcgccgtggagtgggagagcaatgggcagccggagaacaactacaagaccacgcctcccgtgctggactccgacggctccttcttcctctacagcaagctcaccgtggacaagagcaggtggcagcaggggaacgtcttctcatgctccgtgatgcatgaggctctgcacaaccactacacgcagaagagcctctccctgtctccgggtaaatga

SEQ ID NO: 164 - DNA, 5826 bp, Artificial Sequence
  Description of Artificial Sequence: Synthetic polynucleotide
tcgcgcgtttcggtgatgacggtgaaaacctctgacacatgcagctcccggagacggtcacagcttgtctgtaagcggatgccgggagcagacaagcccgtcagggcgcgtcagcgggtgttggcgggtgtcggggctggcttaactatgcggcatcagagcagattgtactgagagtgcaccatatgcggtgtgaaataccgcacagatgcgtaaggagaaaataccgcatcagattggctattggccattgcatacgttgtatccatatcataatatgtacatttatattggctcatgtccaacattaccgccatgttgacattgattattgactagttattaatagtaatcaattacggggtcattagttcatagcccatatatggagttccgcgttacataacttacggtaaatggcccgcctggctgaccgcccaacgacccccgcccattgacgtcaataatgacgtatgttcccatagtaacgccaatagggactttccattgacgtcaatgggtggagtatttacggtaaactgcccacttggcagtacatcaagtgtatcatatgccaagtacgccccctattgacgtcaatgacggtaaatggcccgcctggcattatgcccagtacatgaccttatgggactttcctacttggcagtacatctacgtattagtcatcgctattaccatggtgatgcggttttggcagtacatcaatgggcgtggatagcggtttgactcacggggatttccaagtctccaccccattgacgtcaatgggagtttgttttggcaccaaaatcaacgggactttccaaaatgtcgtaacaactccgccccattgacgcaaatgggcggtaggcgtgtacggtgggaggtctatataagcagagctcgtttagtgaaccgtcagatcgcctggagacgccatccacgctgttttgacctccatagaagacaccgggaccgatccagcctccatcggctcgcatctctccttcacgcgcccgccgccctacctgaggccgccatccacgccggttgagtcgcgttctgccgcctcccgcctgtggtgcctcctgaactgcgtccgccgtctaggtaagtttaaagctcaggtcgagaccgggcctttgtccggcgctcccttggagcctacctagactcagccggctctccacgctttgcctgaccctgcttgctcaactctagttaacggtggagggcagtgtagtctgagcagtactcgttgctgccgcgcgcgccaccagacataatagctgacagactaacagactgttcctttccatgggtcttttctgcagtcaccgtcgtcgacacgtgtgatcagatatcgcggccgctctagaccaccatgggatggtcatgtatcatcctttttctagtagcaactgcaaccggtgtacattcccaggtgcagctggtgcagtctggaggtcagatgaagaagcctggcgagtcgatgagaatttcttgtcgggcttctggatatgaatttattgattgtacgctaaattggattcgtctggcccccggaaaaaggcctgagtggatgggatggctgaagcctcggtggggggccgtcaactacgcacgtccacttcagggcagagtgaccatgactcgagacgtttattccgacacagcctttttggagctgcgctcgttgacagtagacgacacggccgtctacttttgtactaggggaaaaaactgtgattacaattgggacttcgaacactggggccggggcaccccggtcatcgtctcatcaccgtcgaccaagggcccatcggtcttccccctggcaccctcctccaagagcacctctgggggcacagcggccctgggctgcctggtcaaggactacttccccgaaccggtgacggtgtcgtggaactcaggcgccctgaccagcggcgtgcacaccttcccggctgtcctacagtcctcaggactctactccctcagcagcgtggtgaccgtgccctccagcagcttgggcacccagacctacatctgcaacgtgaatcacaagcccagcaacaccaaggtggacaagaaagttgagcccaaatcttgtgacaaaactcacacatgcccaccgtgcccagcacctgaactcctggggggaccgtcagtcttcctcttccccccaaaacccaaggacaccctcatgatctcccggacccctgaggtcacatgcgtggtggtggacgtgagccacgaagaccctgaggtcaagttcaactggtacgtggacggcgtggaggtgcataatgccaagacaaagccgcgggaggagcagtacaacagcacgtaccgtgtggtcagcgtcctcaccgtcctgcaccaggactggctgaatggcaaggagtacaagtgcaaggtctccaacaaagccctcccagcccccatcgagaaaaccatctccaaagccaaagggcagccccgagaaccacaggtgtacaccctgcccccatcccgggatgagctgaccaagaaccaggtcagcctgacctgcctggtcaaaggcttctatcccagcgacatcgccgtggagtgggagagcaatgggcagccggagaacaactacaagaccacgcctcccgtgctggactccgacggctccttcttcctctacagcaagctcaccgtggacaagagcaggtggcagcaggggaacgtcttctcatgctccgtgatgcatgaggctctgcacaaccactacacgcagaagagcctctccctgtctccgggtaaatgatgaggatccagatctgctgtgccttctagttgccagccatctgttgtttgcccctcccccgtgccttccttgaccctggaaggtgccactcccactgtcctttcctaataaaatgaggaaattgcatcgcattgtctgagtaggtgtcattctattctggggggtggggtggggcaggacagcaagggggaggattgggaagacaatagcaggcatgctggggatgcggtgggctctatgggtacccaggtgctgaagaattgacccggttcctcctgggccagaaagaagcaggcacatccccttctctgtgacacaccctgtccacgcccctggttcttagttccagccccactcataggacactcatagctcaggagggctccgccttcaatcccacccgctaaagtacttggagcggtctctccctccctcatcagcccaccaaaccaaacctagcctccaagagtgggaagaaattaaagcaagataggctattaagtgcagagggagagaaaatgcctccaacatgtgaggaagtaatgagagaaatcatagaattttaaggccatgatttaaggccatcatggccttaatcttccgcttcctcgctcactgactcgctgcgctcggtcgttcggctgcggcgagcggtatcagctcactcaaaggcggtaatacggttatccacagaatcaggggataacgcaggaaagaacatgtgagcaaaaggccagcaaaaggccaggaaccgtaaaaaggccgcgttgctggcgtttttccataggctccgcccccctgacgagcatcacaaaaatcgacgctcaagtcagaggtggcgaaacccgacaggactataaagataccaggcgtttccccctggaagctccctcgtgcgctctcctgttccgaccctgccgcttaccggatacctgtccgcctttctcccttcgggaagcgtggcgctttctcatagctcacgctgtaggtatctcagttcggtgtaggtcgttcgctccaagctgggctgtgtgcacgaaccccccgttcagcccgaccgctgcgccttatccggtaactatcgtcttgagtccaacccggtaagacacgacttatcgccactggcagcagccactggtaacaggattagcagagcgaggtatgtaggcggtgctacagagttcttgaagtggtggcctaactacggctacactagaagaacagtatttggtatctgcgctctgctgaagccagttaccttcggaaaaagagttggtagctcttgatccggcaaacaaaccaccgctggtagcggtggtttttttgtttgcaagcagcagattacgcgcagaaaaaaaggatctcaagaagatcctttgatcttttctacggggtctgacgctcagtggaacgaaaactcacgttaagggattttggtcatgagattatcaaaaaggatcttcacctagatccttttaaattaaaaatgaagttttaaatcaatctaaagtatatatgagtaaacttggtctgacagttaccaatgcttaatcagtgaggcacctatctcagcgatctgtctatttcgttcatccatagttgcctgactcggggggggggggcgctgaggtctgcctcgtgaagaaggtgttgctgactcataccaggcctgaatcgccccatcatccagccagaaagtgagggagccacggttgatgagagctttgttgtaggtggaccagttggtgattttgaacttttgctttgccacggaacggtctgcgttgtcgggaagatgcgtgatctgatccttcaactcagcaaaagttcgatttattcaacaaagccgccgtcccgtcaagtcagcgtaatgctctgccagtgttacaaccaattaaccaattctgattagaaaaactcatcgagcatcaaatgaaactgcaatttattcatatcaggattatcaataccatatttttgaaaaagccgtttctgtaatgaaggagaaaactcaccgaggcagttccataggatggcaagatcctggtatcggtctgcgattccgactcgtccaacatcaatacaacctattaatttcccctcgtcaaaaataaggttatcaagtgagaaatcaccatgagtgacgactgaatccggtgagaatggcaaaagcttatgcatttctttccagacttgttcaacaggccagccattacgctcgtcatcaaaatcactcgcatcaaccaaaccgttattcattcgtgattgcgcctgagcgagacgaaatacgcgatcgctgttaaaaggacaattacaaacaggaatcgaatgcaaccggcgcaggaacactgccagcgcatcaacaatattttcacctgaatcaggatattcttctaatacctggaatgctgttttcccggggatcgcagtggtgagtaaccatgcatcatcaggagtacggataaaatgcttgatggtcggaagaggcataaattccgtcagccagtttagtctgaccatctcatctgtaacatcattggcaacgctacctttgccatgtttcagaaacaactctggcgcatcgggcttcccatacaatcgatagattgtcgcacctgattgcccgacattatcgcgagcccatttatacccatataaatcagcatccatgttggaatttaatcgcggcctcgagcaagacgtttcccgttgaatatggctcataacaccccttgtattactgtttatgtaagcagacagttttattgttcatgatgatatatttttatcttgtgcaatgtaacatcagagattttgagacacaacgtggctttccccccccccccattattgaagcatttatcagggttattgtctcatgagcggatacatatttgaatgtatttagaaaaataaacaaataggggttccgcgcacatttccccgaaaagtgccacctgacgtctaagaaaccattattatcatgacattaacctataaaaataggcgtatcacgaggccctttcgtc

SEQ ID NO: 165 - DNA, 690 bp, Artificial Sequence; identical to SEQ ID NO: 135
  Description of Artificial Sequence: Synthetic polynucleotide

SEQ ID NO: 166 - DNA, 5102 bp, Artificial Sequence; identical to SEQ ID NO: 136
  Description of Artificial Sequence: Synthetic polynucleotide

SEQ ID NO: 167 - DNA, 690 bp, Artificial Sequence; identical to SEQ ID NO: 137
  Description of Artificial Sequence: Synthetic polynucleotide

SEQ ID NO: 168 - DNA, 5102 bp, Artificial Sequence; identical to SEQ ID NO: 138
  Description of Artificial Sequence: Synthetic polynucleotide

SEQ ID NO: 169 - DNA, 690 bp, Artificial Sequence
  Description of Artificial Sequence: Synthetic polynucleotide
atgggatggtcatgtatcatcctttttctagtagcaactgcaaccggtgtacattcagaaattgtgttgacacagtctccaggcaccctgtctttgtctccaggggaaacagccatcatctcttgtcggaccagtcagtatggttccttagcctggtatcaacagaggcccggccaggcccccaggctcgtcatctattcgggctctactcgggccgctggcatcccagacaggttcagcggcagtcggtgggggccagactacgaactcaccatcagcaacctggagtcgggagattttggtgtttattattgccagcagtatgaattttttggccaggggaccaaggtccaggtcgacattaaacgtacggtggctgcaccatctgtcttcatcttcccgccatctgatgagcagttgaaatctggaactgcctctgttgtgtgcctgctgaataacttctaccccagagaagccaaagtgcagtggaaggtggacaacgccctgcagagcggaaacagccaggaaagcgtgacagagcaggattccaaggattccacatacagcctgagcagcacactgacactgtccaaggccgactacgagaagcacaaggtgtacgcctgcgaagtgacacaccagggactgtcctcccctgtgacaaagagcttcaacagaggagaatgctga

SEQ ID NO: 170 - DNA, 5102 bp, Artificial Sequence
  Description of Artificial Sequence: Synthetic polynucleotide
tcgcgcgtttcggtgatgacggtgaaaacctctgacacatgcagctcccggagacggtcacagcttgtctgtaagcggatgccgggagcagacaagcccgtcagggcgcgtcagcgggtgttggcgggtgtcggggctggcttaactatgcggcatcagagcagattgtactgagagtgcaccatatgcggtgtgaaataccgcacagatgcgtaaggagaaaataccgcatcagattggctattggccattgcatacgttgtatccatatcataatatgtacatttatattggctcatgtccaacattaccgccatgttgacattgattattgactagttattaatagtaatcaattacggggtcattagttcatagcccatatatggagttccgcgttacataacttacggtaaatggcccgcctggctgaccgcccaacgacccccgcccattgacgtcaataatgacgtatgttcccatagtaacgccaatagggactttccattgacgtcaatgggtggagtatttacggtaaactgcccacttggcagtacatcaagtgtatcatatgccaagtacgccccctattgacgtcaatgacggtaaatggcccgcctggcattatgcccagtacatgaccttatgggactttcctacttggcagtacatctacgtattagtcatcgctattaccatggtgatgcggttttggcagtacatcaatgggcgtggatagcggtttgactcacggggatttccaagtctccaccccattgacgtcaatgggagtttgttttggcaccaaaatcaacgggactttccaaaatgtcgtaacaactccgccccattgacgcaaatgggcggtaggcgtgtacggtgggaggtctatataagcagagctcgtttagtgaaccgtcagatcgcctggagacgccatccacgctgttttgacctccatagaagacaccgggaccgatccagcctccatcggctcgcatctctccttcacgcgcccgccgccctacctgaggccgccatccacgccggttgagtcgcgttctgccgcctcccgcctgtggtgcctcctgaactgcgtccgccgtctaggtaagtttaaagctcaggtcgagaccgggcctttgtccggcgctcccttggagcctacctagactcagccggctctccacgctttgcctgaccctgcttgctcaactctagttaacggtggagggcagtgtagtctgagcagtactcgttgctgccgcgcgcgccaccagacataatagctgacagactaacagactgttcctttccatgggtcttttctgcagtcaccgtcgtcgacacgtgtgatcagatatcgcggccgctctagaccaccatgggatggtcatgtatcatcctttttctagtagcaactgcaaccggtgtacattcagaaattgtgttgacacagtctccaggcaccctgtctttgtctccaggggaaacagccatcatctcttgtcggaccagtcagtatggttccttagcctggtatcaacagaggcccggccaggcccccaggctcgtcatctattcgggctctactcgggccgctggcatcccagacaggttcagcggcagtcggtgggggccagactacgaactcaccatcagcaacctggagtcgggagattttggtgtttattattgccagcagtatgaattttttggccaggggaccaaggtccaggtcgacattaaacgtacggtggctgcaccatctgtcttcatcttcccgccatctgatgagcagttgaaatctggaactgcctctgttgtgtgcctgctgaataacttctaccccagagaagccaaagtgcagtggaaggtggacaacgccctgcagagcggaaacagccaggaaagcgtgacagagcaggattccaaggattccacatacagcctgagcagcacactgacactgtccaaggccgactacgagaagcacaaggtgtacgcctgcgaagtgacacaccagggactgtcctcccctgtgacaaagagcttcaacagaggagaatgctgataggatccagatctgctgtgccttctagttgccagccatctgttgtttgcccctcccccgtgccttccttgaccctggaaggtgccactcccactgtcctttcctaataaaatgaggaaattgcatcgcattgtctgagtaggtgtcattctattctggggggtggggtggggcaggacagcaagggggaggattgggaagacaatagcaggcatgctggggatgcggtgggctctatgggtacccaggtgctgaagaattgacccggttcctcctgggccagaaagaagcaggcacatccccttctctgtgacacaccctgtccacgcccctggttcttagttccagccccactcataggacactcatagctcaggagggctccgccttcaatcccacccgctaaagtacttggagcggtctctccctccctcatcagcccaccaaaccaaacctagcctccaagagtgggaagaaattaaagcaagataggctattaagtgcagagggagagaaaatgcctccaacatgtgaggaagtaatgagagaaatcatagaattttaaggccatgatttaaggccatcatggccttaatcttccgcttcctcgctcactgactcgctgcgctcggtcgttcggctgcggcgagcggtatcagctcactcaaaggcggtaatacggttatccacagaatcaggggataacgcaggaaagaacatgtgagcaaaaggccagcaaaaggccaggaaccgtaaaaaggccgcgttgctggcgtttttccataggctccgcccccctgacgagcatcacaaaaatcgacgctcaagtcagaggtggcgaaacccgacaggactataaagataccaggcgtttccccctggaagctccctcgtgcgctctcctgttccgaccctgccgcttaccggatacctgtccgcctttctcccttcgggaagcgtggcgctttctcatagctcacgctgtaggtatctcagttcggtgtaggtcgttcgctccaagctgggctgtgtgcacgaaccccccgttcagcccgaccgctgcgccttatccggtaactatcgtcttgagtccaacccggtaagacacgacttatcgccactggcagcagccactggtaacaggattagcagagcgaggtatgtaggcggtgctacagagttcttgaagtggtggcctaactacggctacactagaagaacagtatttggtatctgcgctctgctgaagccagttaccttcggaaaaagagttggtagctcttgatccggcaaacaaaccaccgctggtagcggtggtttttttgtttgcaagcagcagattacgcgcagaaaaaaaggatctcaagaagatcctttgatcttttctacggggtctgacgctcagtggaacgaaaactcacgttaagggattttggtcatgagattatcaaaaaggatcttcacctagatccttttaaattaaaaatgaagttttaaatcaatctaaagtatatatgagtaaacttggtctgacagttaccaatgcttaatcagtgaggcacctatctcagcgatctgtctatttcgttcatccatagttgcctgactcggggggggggggcgctgaggtctgcctcgtgaagaaggtgttgctgactcataccaggcctgaatcgccccatcatccagccagaaagtgagggagccacggttgatgagagctttgttgtaggtggaccagttggtgattttgaacttttgctttgccacggaacggtctgcgttgtcgggaagatgcgtgatctgatccttcaactcagcaaaagttcgatttattcaacaaagccgccgtcccgtcaagtcagcgtaatgctctgccagtgttacaaccaattaaccaattctgattagaaaaactcatcgagcatcaaatgaaactgcaatttattcatatcaggattatcaataccatatttttgaaaaagccgtttctgtaatgaaggagaaaactcaccgaggcagttccataggatggcaagatcctggtatcggtctgcgattccgactcgtccaacatcaatacaacctattaatttcccctcgtcaaaaataaggttatcaagtgagaaatcaccatgagtgacgactgaatccggtgagaatggcaaaagcttatgcatttctttccagacttgttcaacaggccagccattacgctcgtcatcaaaatcactcgcatcaaccaaaccgttattcattcgtgattgcgcctgagcgagacgaaatacgcgatcgctgttaaaaggacaattacaaacaggaatcgaatgcaaccggcgcaggaacactgccagcgcatcaacaatattttcacctgaatcaggatattcttctaatacctggaatgctgttttcccggggatcgcagtggtgagtaaccatgcatcatcaggagtacggataaaatgcttgatggtcggaagaggcataaattccgtcagccagtttagtctgaccatctcatctgtaacatcattggcaacgctacctttgccatgtttcagaaacaactctggcgcatcgggcttcccatacaatcgatagattgtcgcacctgattgcccgacattatcgcgagcccatttatacccatataaatcagcatccatgttggaatttaatcgcggcctcgagcaagacgtttcccgttgaatatggctcataacaccccttgtattactgtttatgtaagcagacagttttattgttcatgatgatatatttttatcttgtgcaatgtaacatcagagattttgagacacaacgtggctttccccccccccccattattgaagcatttatcagggttattgtctcatgagcggatacatatttgaatgtatttagaaaaataaacaaataggggttccgcgcacatttccccgaaaagtgccacctgacgtctaagaaaccattattatcatgacattaacctataaaaataggcgtatcacgaggccctttcgtc

SEQ ID NO: 171 - DNA, 690 bp, Artificial Sequence
  Description of Artificial Sequence: Synthetic polynucleotide
atgggatggtcatgtatcatcctttttctagtagcaactgcaaccggtgtacattcagaaattgtgttgacacagtctccaggcaccctgtctttgtctccaggggaaacagccatcatctcttgtcggaccagtcagtatggttccttagcctggtatcaacagaggcccggccaggcccccaggctcgtcatctattcgggctctactcgggccgctggcatcccagacaggttcagcggcagtcggtgggggccagactactttctcaccatcagcaacctggagtcgggagattttggtgtttattattgccagcagtatgaattttttggccaggggaccaaggtccaggtcgacattaaacgtacggtggctgcaccatctgtcttcatcttcccgccatctgatgagcagttgaaatctggaactgcctctgttgtgtgcctgctgaataacttctaccccagagaagccaaagtgcagtggaaggtggacaacgccctgcagagcggaaacagccaggaaagcgtgacagagcaggattccaaggattccacatacagcctgagcagcacactgacactgtccaaggccgactacgagaagcacaaggtgtacgcctgcgaagtgacacaccagggactgtcctcccctgtgacaaagagcttcaacagaggagaatgctga

SEQ ID NO: 172 - DNA, 5102 bp, Artificial Sequence
  Description of Artificial Sequence: Synthetic polynucleotide
tcgcgcgtttcggtgatgacggtgaaaacctctgacacatgcagctcccggagacggtcacagcttgtctgtaagcggatgccgggagcagacaagcccgtcagggcgcgtcagcgggtgttggcgggtgtcggggctggcttaactatgcggcatcagagcagattgtactgagagtgcaccatatgcggtgtgaaataccgcacagatgcgtaaggagaaaataccgcatcagattggctattggccattgcatacgttgtatccatatcataatatgtacatttatattggctcatgtccaacattaccgccatgttgacattgattattgactagttattaatagtaatcaattacggggtcattagttcatagcccatatatggagttccgcgttacataacttacggtaaatggcccgcctggctgaccgcccaacgacccccgcccattgacgtcaataatgacgtatgttcccatagtaacgccaatagggactttccattgacgtcaatgggtggagtatttacggtaaactgcccacttggcagtacatcaagtgtatcatatgccaagtacgccccctattgacgtcaatgacggtaaatggcccgcctggcattatgcccagtacatgaccttatgggactttcctacttggcagtacatctacgtattagtcatcgctattaccatggtgatgcggttttggcagtacatcaatgggcgtggatagcggtttgactcacggggatttccaagtctccaccccattgacgtcaatgggagtttgttttggcaccaaaatcaacgggactttccaaaatgtcgtaacaactccgccccattgacgcaaatgggcggtaggcgtgtacggtgggaggtctatataagcagagctcgtttagtgaaccgtcagatcgcctggagacgccatccacgctgttttgacctccatagaagacaccgggaccgatccagcctccatcggctcgcatctctccttcacgcgcccgccgccctacctgaggccgccatccacgccggttgagtcgcgttctgccgcctcccgcctgtggtgcctcctgaactgcgtccgccgtctaggtaagtttaaagctcaggtcgagaccgggcctttgtccggcgctcccttggagcctacctagactcagccggctctccacgctttgcctgaccctgcttgctcaactctagttaacggtggagggcagtgtagtctgagcagtactcgttgctgccgcgcgcgccaccagacataatagctgacagactaacagactgttcctttccatgggtcttttctgcagtcaccgtcgtcgacacgtgtgatcagatatcgcggccgctctagaccaccatgggatggtcatgtatcatcctttttctagtagcaactgcaaccggtgtacattcagaaattgtgttgacacagtctccaggcaccctgtctttgtctccaggggaaacagccatcatctcttgtcggaccagtcagtatggttccttagcctggtatcaacagaggcccggccaggcccccaggctcgtcatctattcgggctctactcgggccgctggcatcccagacaggttcagcggcagtcggtgggggccagactactttctcaccatcagcaacctggagtcgggagattttggtgtttattattgccagcagtatgaattttttggccaggggaccaaggtccaggtcgacattaaacgtacggtggctgcaccatctgtcttcatcttcccgccatctgatgagcagttgaaatctggaactgcctctgttgtgtgcctgctgaataacttctaccccagagaagccaaagtgcagtggaaggtggacaacgccctgcagagcggaaacagccaggaaagcgtgacagagcaggattccaaggattccacatacagcctgagcagcacactgacactgtccaaggccgactacgagaagcacaaggtgtacgcctgcgaagtgacacaccagggactgtcctcccctgtgacaaagagcttcaacagaggagaatgctgataggatccagatctgctgtgccttctagttgccagccatctgttgtttgcccctcccccgtgccttccttgaccctggaaggtgccactcccactgtcctttcctaataaaatgaggaaattgcatcgcattgtctgagtaggtgtcattctattctggggggtggggtggggcaggacagcaagggggaggattgggaagacaatagcaggcatgctggggatgcggtgggctctatgggtacccaggtgctgaagaattgacccggttcctcctgggccagaaagaagcaggcacatccccttctctgtgacacaccctgtccacgcccctggttcttagttccagccccactcataggacactcatagctcaggagggctccgccttcaatcccacccgctaaagtacttggagcggtctctccctccctcatcagcccaccaaaccaaacctagcctccaagagtgggaagaaattaaagcaagataggctattaagtgcagagggagagaaaatgcctccaacatgtgaggaagtaatgagagaaatcatagaattttaaggccatgatttaaggccatcatggccttaatcttccgcttcctcgctcactgactcgctgcgctcggtcgttcggctgcggcgagcggtatcagctcactcaaaggcggtaatacggttatccacagaatcaggggataacgcaggaaagaacatgtgagcaaaaggccagcaaaaggccaggaaccgtaaaaaggccgcgttgctggcgtttttccataggctccgcccccctgacgagcatcacaaaaatcgacgctcaagtcagaggtggcgaaacccgacaggactataaagataccaggcgtttccccctggaagctccctcgtgcgctctcctgttccgaccctgccgcttaccggatacctgtccgcctttctcccttcgggaagcgtggcgctttctcatagctcacgctgtaggtatctcagttcggtgtaggtcgttcgctccaagctgggctgtgtgcacgaaccccccgttcagcccgaccgctgcgccttatccggtaactatcgtcttgagtccaacccggtaagacacgacttatcgccactggcagcagccactggtaacaggattagcagagcgaggtatgtaggcggtgctacagagttcttgaagtggtggcctaactacggctacactagaagaacagtatttggtatctgcgctctgctgaagccagttaccttcggaaaaagagttggtagctcttgatccggcaaacaaaccaccgctggtagcggtggtttttttgtttgcaagcagcagattacgcgcagaaaaaaaggatctcaagaagatcctttgatcttttctacggggtctgacgctcagtggaacgaaaactcacgttaagggattttggtcatgagattatcaaaaaggatcttcacctagatccttttaaattaaaaatgaagttttaaatcaatctaaagtatatatgagtaaacttggtctgacagttaccaatgcttaatcagtgaggcacctatctcagcgatctgtctatttcgttcatccatagttgcctgactcggggggggggggcgctgaggtctgcctcgtgaagaaggtgttgctgactcataccaggcctgaatcgccccatcatccagccagaaagtgagggagccacggttgatgagagctttgttgtaggtggaccagttggtgattttgaacttttgctttgccacggaacggtctgcgttgtcgggaagatgcgtgatctgatccttcaactcagcaaaagttcgatttattcaacaaagccgccgtcccgtcaagtcagcgtaatgctctgccagtgttacaaccaattaaccaattctgattagaaaaactcatcgagcatcaaatgaaactgcaatttattcatatcaggattatcaataccatatttttgaaaaagccgtttctgtaatgaaggagaaaactcaccgaggcagttccataggatggcaagatcctggtatcggtctgcgattccgactcgtccaacatcaatacaacctattaatttcccctcgtcaaaaataaggttatcaagtgagaaatcaccatgagtgacgactgaatccggtgagaatggcaaaagcttatgcatttctttccagacttgttcaacaggccagccattacgctcgtcatcaaaatcactcgcatcaaccaaaccgttattcattcgtgattgcgcctgagcgagacgaaatacgcgatcgctgttaaaaggacaattacaaacaggaatcgaatgcaaccggcgcaggaacactgccagcgcatcaacaatattttcacctgaatcaggatattcttctaatacctggaatgctgttttcccggggatcgcagtggtgagtaaccatgcatcatcaggagtacggataaaatgcttgatggtcggaagaggcataaattccgtcagccagtttagtctgaccatctcatctgtaacatcattggcaacgctacctttgccatgtttcagaaacaactctggcgcatcgggcttcccatacaatcgatagattgtcgcacctgattgcccgacattatcgcgagcccatttatacccatataaatcagcatccatgttggaatttaatcgcggcctcgagcaagacgtttcccgttgaatatggctcataacaccccttgtattactgtttatgtaagcagacagttttattgttcatgatgatatatttttatcttgtgcaatgtaacatcagagattttgagacacaacgtggctttccccccccccccattattgaagcatttatcagggttattgtctcatgagcggatacatatttgaatgtatttagaaaaataaacaaataggggttccgcgcacatttccccgaaaagtgccacctgacgtctaagaaaccattattatcatgacattaacctataaaaataggcgtatcacgaggccctttcgtc

SEQ ID NO: 173 - DNA, 690 bp, Artificial Sequence
  Description of Artificial Sequence: Synthetic polynucleotide
atgggatggtcatgtatcatcctttttctagtagcaactgcaaccggtgtacattcagaaattgtgttgacacagtctccaggcaccctgtctttgtctccaggggaaacagccatcatctcttgtcggaccagtcagtatggttccttagcctggtatcaacagaggcccggccaggcccccaggctcgtcatctattcgggctctactcgggccgctggcatcccagacaggttcagcggcagtcggtgggggccagactactctctcaccatcagcaacctggagtcgggagattttggtgtttattattgccagcagtatgaattttttggccaggggaccaaggtccaggtcgacattaaacgtacggtggctgcaccatctgtcttcatcttcccgccatctgatgagcagttgaaatctggaactgcctctgttgtgtgcctgctgaataacttctaccccagagaagccaaagtgcagtggaaggtggacaacgccctgcagagcggaaacagccaggaaagcgtgacagagcaggattccaaggattccacatacagcctgagcagcacactgacactgtccaaggccgactacgagaagcacaaggtgtacgcctgcgaagtgacacaccagggactgtcctcccctgtgacaaagagcttcaacagaggagaatgctga

SEQ ID NO: 174 - DNA, 5102 bp, Artificial Sequence
  Description of Artificial Sequence: Synthetic polynucleotide
tcgcgcgtttcggtgatgacggtgaaaacctctgacacatgcagctcccggagacggtcacagcttgtctgtaagcggatgccgggagcagacaagcccgtcagggcgcgtcagcgggtgttggcgggtgtcggggctggcttaactatgcggcatcagagcagattgtactgagagtgcaccatatgcggtgtgaaataccgcacagatgcgtaaggagaaaataccgcatcagattggctattggccattgcatacgttgtatccatatcataatatgtacatttatattggctcatgtccaacattaccgccatgttgacattgattattgactagttattaatagtaatcaattacggggtcattagttcatagcccatatatggagttccgcgttacataacttacggtaaatggcccgcctggctgaccgcccaacgacccccgcccattgacgtcaataatgacgtatgttcccatagtaacgccaatagggactttccattgacgtcaatgggtggagtatttacggtaaactgcccacttggcagtacatcaagtgtatcatatgccaagtacgccccctattgacgtcaatgacggtaaatggcccgcctggcattatgcccagtacatgaccttatgggactttcctacttggcagtacatctacgtattagtcatcgctattaccatggtgatgcggttttggcagtacatcaatgggcgtggatagcggtttgactcacggggatttccaagtctccaccccattgacgtcaatgggagtttgttttggcaccaaaatcaacgggactttccaaaatgtcgtaacaactccgccccattgacgcaaatgggcggtaggcgtgtacggtgggaggtctatataagcagagctcgtttagtgaaccgtcagatcgcctggagacgccatccacgctgttttgacctccatagaagacaccgggaccgatccagcctccatcggctcgcatctctccttcacgcgcccgccgccctacctgaggccgccatccacgccggttgagtcgcgttctgccgcctcccgcctgtggtgcctcctgaactgcgtccgccgtctaggtaagtttaaagctcaggtcgagaccgggcctttgtccggcgctcccttggagcctacctagactcagccggctctccacgctttgcctgaccctgcttgctcaactctagttaacggtggagggcagtgtagtctgagcagtactcgttgctgccgcgcgcgccaccagacataatagctgacagactaacagactgttcctttccatgggtcttttctgcagtcaccgtcgtcgacacgtgtgatcagatatcgcggccgctctagaccaccatgggatggtcatgtatcatcctttttctagtagcaactgcaaccggtgtacattcagaaattgtgttgacacagtctccaggcaccctgtctttgtctccaggggaaacagccatcatctcttgtcggaccagtcagtatggttccttagcctggtatcaacagaggcccggccaggcccccaggctcgtcatctattcgggctctactcgggccgctggcatcccagacaggttcagcggcagtcggtgggggccagactactctctcaccatcagcaacctggagtcgggagattttggtgtttattattgccagcagtatgaattttttggccaggggaccaaggtccaggtcgacattaaacgtacggtggctgcaccatctgtcttcatcttcccgccatctgatgagcagttgaaatctggaactgcctctgttgtgtgcctgctgaataacttctaccccagagaagccaaagtgcagtggaaggtggacaacgccctgcagagcggaaacagccaggaaagcgtgacagagcaggattccaaggattccacatacagcctgagcagcacactgacactgtccaaggccgactacgagaagcacaaggtgtacgcctgcgaagtgacacaccagggactgtcctcccctgtgacaaagagcttcaacagaggagaatgctgataggatccagatctgctgtgccttctagttgccagccatctgttgtttgcccctcccccgtgccttccttgaccctggaaggtgccactcccactgtcctttcctaataaaatgaggaaattgcatcgcattgtctgagtaggtgtcattctattctggggggtggggtggggcaggacagcaagggggaggattgggaagacaatagcaggcatgctggggatgcggtgggctctatgggtacccaggtgctgaagaattgacccggttcctcctgggccagaaagaagcaggcacatccccttctctgtgacacaccctgtccacgcccctggttcttagttccagccccactcataggacactcatagctcaggagggctccgccttcaatcccacccgctaaagtacttggagcggtctctccctccctcatcagcccaccaaaccaaacctagcctccaagagtgggaagaaattaaagcaagataggctattaagtgcagagggagagaaaatgcctccaacatgtgaggaagtaatgagagaaatcatagaattttaaggccatgatttaaggccatcatggccttaatcttccgcttcctcgctcactgactcgctgcgctcggtcgttcggctgcggcgagcggtatcagctcactcaaaggcggtaatacggttatccacagaatcaggggataacgcaggaaagaacatgtgagcaaaaggccagcaaaaggccaggaaccgtaaaaaggccgcgttgctggcgtttttccataggctccgcccccctgacgagcatcacaaaaatcgacgctcaagtcagaggtggcgaaacccgacaggactataaagataccaggcgtttccccctggaagctccctcgtgcgctctcctgttccgaccctgccgcttaccggatacctgtccgcctttctcccttcgggaagcgtggcgctttctcatagctcacgctgtaggtatctcagttcggtgtaggtcgttcgctccaagctgggctgtgtgcacgaaccccccgttcagcccgaccgctgcgccttatccggtaactatcgtcttgagtccaacccggtaagacacgacttatcgccactggcagcagccactggtaacaggattagcagagcgaggtatgtaggcggtgctacagagttcttgaagtggtggcctaactacggctacactagaagaacagtatttggtatctgcgctctgctgaagccagttaccttcggaaaaagagttggtagctcttgatccggcaaacaaaccaccgctggtagcggtggtttttttgtttgcaagcagcagattacgcgcagaaaaaaaggatctcaagaagatcctttgatcttttctacggggtctgacgctcagtggaacgaaaactcacgttaagggattttggtcatgagattatcaaaaaggatcttcacctagatccttttaaattaaaaatgaagttttaaatcaatctaaagtatatatgagtaaacttggtctgacagttaccaatgcttaatcagtgaggcacctatctcagcgatctgtctatttcgttcatccatagttgcctgactcggggggggggggcgctgaggtctgcctcgtgaagaaggtgttgctgactcataccaggcctgaatcgccccatcatccagccagaaagtgagggagccacggttgatgagagctttgttgtaggtggaccagttggtgattttgaacttttgctttgccacggaacggtctgcgttgtcgggaagatgcgtgatctgatccttcaactcagcaaaagttcgatttattcaacaaagccgccgtcccgtcaagtcagcgtaatgctctgccagtgttacaaccaattaaccaattctgattagaaaaactcatcgagcatcaaatgaaactgcaatttattcatatcaggattatcaataccatatttttgaaaaagccgtttctgtaatgaaggagaaaactcaccgaggcagttccataggatggcaagatcctggtatcggtctgcgattccgactcgtccaacatcaatacaacctattaatttcccctcgtcaaaaataaggttatcaagtgagaaatcaccatgagtgacgactgaatccggtgagaatggcaaaagcttatgcatttctttccagacttgttcaacaggccagccattacgctcgtcatcaaaatcactcgcatcaaccaaaccgttattcattcgtgattgcgcctgagcgagacgaaatacgcgatcgctgttaaaaggacaattacaaacaggaatcgaatgcaaccggcgcaggaacactgccagcgcatcaacaatattttcacctgaatcaggatattcttctaatacctggaatgctgttttcccggggatcgcagtggtgagtaaccatgcatcatcaggagtacggataaaatgcttgatggtcggaagaggcataaattccgtcagccagtttagtctgaccatctcatctgtaacatcattggcaacgctacctttgccatgtttcagaaacaactctggcgcatcgggcttcccatacaatcgatagattgtcgcacctgattgcccgacattatcgcgagcccatttatacccatataaatcagcatccatgttggaatttaatcgcggcctcgagcaagacgtttcccgttgaatatggctcataacaccccttgtattactgtttatgtaagcagacagttttattgttcatgatgatatatttttatcttgtgcaatgtaacatcagagattttgagacacaacgtggctttccccccccccccattattgaagcatttatcagggttattgtctcatgagcggatacatatttgaatgtatttagaaaaataaacaaataggggttccgcgcacatttccccgaaaagtgccacctgacgtctaagaaaccattattatcatgacattaacctataaaaataggcgtatcacgaggccctttcgtc

SEQ ID NO: 175 - DNA, 690 bp, Artificial Sequence
  Description of Artificial Sequence: Synthetic polynucleotide
atgggatggtcatgtatcatcctttttctagtagcaactgcaaccggtgtacattcagaaattgtgttgacacagtctccaggcaccctgtctttgtctccaggggaaacagccatcatctcttgtcggaccagtcagtatggttccttagcctggtatcaacagaggcccggccaggcccccaggctcgtcatctattcgggctctactcgggccgctggcatcccagacaggttcagcggcagtcggtgggggccagactacaatctcatcatcagcaacctggagtcgggagattttggtgtttattattgccagcagtatgaattttttggccaggggaccaaggtccaggtcgacattaaacgtacggtggctgcaccatctgtcttcatcttcccgccatctgatgagcagttgaaatctggaactgcctctgttgtgtgcctgctgaataacttctaccccagagaagccaaagtgcagtggaaggtggacaacgccctgcagagcggaaacagccaggaaagcgtgacagagcaggattccaaggattccacatacagcctgagcagcacactgacactgtccaaggccgactacgagaagcacaaggtgtacgcctgcgaagtgacacaccagggactgtcctcccctgtgacaaagagcttcaacagaggagaatgctga

SEQ ID NO: 176 - DNA, 5102 bp, Artificial Sequence
  Description of Artificial Sequence: Synthetic polynucleotide
tcgcgcgtttcggtgatgacggtgaaaacctctgacacatgcagctcccggagacggtcacagcttgtctgtaagcggatgccgggagcagacaagcccgtcagggcgcgtcagcgggtgttggcgggtgtcggggctggcttaactatgcggcatcagagcagattgtactgagagtgcaccatatgcggtgtgaaataccgcacagatgcgtaaggagaaaataccgcatcagattggctattggccattgcatacgttgtatccatatcataatatgtacatttatattggctcatgtccaacattaccgccatgttgacattgattattgactagttattaatagtaatcaattacggggtcattagttcatagcccatatatggagttccgcgttacataacttacggtaaatggcccgcctggctgaccgcccaacgacccccgcccattgacgtcaataatgacgtatgttcccatagtaacgccaatagggactttccattgacgtcaatgggtggagtatttacggtaaactgcccacttggcagtacatcaagtgtatcatatgccaagtacgccccctattgacgtcaatgacggtaaatggcccgcctggcattatgcccagtacatgaccttatgggactttcctacttggcagtacatctacgtattagtcatcgctattaccatggtgatgcggttttggcagtacatcaatgggcgtggatagcggtttgactcacggggatttccaagtctccaccccattgacgtcaatgggagtttgttttggcaccaaaatcaacgggactttccaaaatgtcgtaacaactccgccccattgacgcaaatgggcggtaggcgtgtacggtgggaggtctatataagcagagctcgtttagtgaaccgtcagatcgcctggagacgccatccacgctgttttgacctccatagaagacaccgggaccgatccagcctccatcggctcgcatctctccttcacgcgcccgccgccctacctgaggccgccatccacgccggttgagtcgcgttctgccgcctcccgcctgtggtgcctcctgaactgcgtccgccgtctaggtaagtttaaagctcaggtcgagaccgggcctttgtccggcgctcccttggagcctacctagactcagccggctctccacgctttgcctgaccctgcttgctcaactctagttaacggtggagggcagtgtagtctgagcagtactcgttgctgccgcgcgcgccaccagacataatagctgacagactaacagactgttcctttccatgggtcttttctgcagtcaccgtcgtcgacacgtgtgatcagatatcgcggccgctctagaccaccatgggatggtcatgtatcatcctttttctagtagcaactgcaaccggtgtacattcagaaattgtgttgacacagtctccaggcaccctgtctttgtctccaggggaaacagccatcatctcttgtcggaccagtcagtatggttccttagcctggtatcaacagaggcccggccaggcccccaggctcgtcatctattcgggctctactcgggccgctggcatcccagacaggttcagcggcagtcggtgggggccagactacaatctcatcatcagcaacctggagtcgggagattttggtgtttattattgccagcagtatgaattttttggccaggggaccaaggtccaggtcgacattaaacgtacggtggctgcaccatctgtcttcatcttcccgccatctgatgagcagttgaaatctggaactgcctctgttgtgtgcctgctgaataacttctaccccagagaagccaaagtgcagtggaaggtggacaacgccctgcagagcggaaacagccaggaaagcgtgacagagcaggattccaaggattccacatacagcctgagcagcacactgacactgtccaaggccgactacgagaagcacaaggtgtacgcctgcgaagtgacacaccagggactgtcctcccctgtgacaaagagcttcaacagaggagaatgctgataggatccagatctgctgtgccttctagttgccagccatctgttgtttgcccctcccccgtgccttccttgaccctggaaggtgccactcccactgtcctttcctaataaaatgaggaaattgcatcgcattgtctgagtaggtgtcattctattctggggggtggggtggggcaggacagcaagggggaggattgggaagacaatagcaggcatgctggggatgcggtgggctctatgggtacccaggtgctgaagaattgacccggttcctcctgggccagaaagaagcaggcacatccccttctctgtgacacaccctgtccacgcccctggttcttagttccagccccactcataggacactcatagctcaggagggctccgccttcaatcccacccgctaaagtacttggagcggtctctccctccctcatcagcccaccaaaccaaacctagcctccaagagtgggaagaaattaaagcaagataggctattaagtgcagagggagagaaaatgcctccaacatgtgaggaagtaatgagagaaatcatagaattttaaggccatgatttaaggccatcatggccttaatcttccgcttcctcgctcactgactcgctgcgctcggtcgttcggctgcggcgagcggtatcagctcactcaaaggcggtaatacggttatccacagaatcaggggataacgcaggaaagaacatgtgagcaaaaggccagcaaaaggccaggaaccgtaaaaaggccgcgttgctggcgtttttccataggctccgcccccctgacgagcatcacaaaaatcgacgctcaagtcagaggtggcgaaacccgacaggactataaagataccaggcgtttccccctggaagctccctcgtgcgctctcctgttccgaccctgccgcttaccggatacctgtccgcctttctcccttcgggaagcgtggcgctttctcatagctcacgctgtaggtatctcagttcggtgtaggtcgttcgctccaagctgggctgtgtgcacgaaccccccgttcagcccgaccgctgcgccttatccggtaactatcgtcttgagtccaacccggtaagacacgacttatcgccactggcagcagccactggtaacaggattagcagagcgaggtatgtaggcggtgctacagagttcttgaagtggtggcctaactacggctacactagaagaacagtatttggtatctgcgctctgctgaagccagttaccttcggaaaaagagttggtagctcttgatccggcaaacaaaccaccgctggtagcggtggtttttttgtttgcaagcagcagattacgcgcagaaaaaaaggatctcaagaagatcctttgatcttttctacggggtctgacgctcagtggaacgaaaactcacgttaagggattttggtcatgagattatcaaaaaggatcttcacctagatccttttaaattaaaaatgaagttttaaatcaatctaaagtatatatgagtaaacttggtctgacagttaccaatgcttaatcagtgaggcacctatctcagcgatctgtctatttcgttcatccatagttgcctgactcggggggggggggcgctgaggtctgcctcgtgaagaaggtgttgctgactcataccaggcctgaatcgccccatcatccagccagaaagtgagggagccacggttgatgagagctttgttgtaggtggaccagttggtgattttgaacttttgctttgccacggaacggtctgcgttgtcgggaagatgcgtgatctgatccttcaactcagcaaaagttcgatttattcaacaaagccgccgtcccgtcaagtcagcgtaatgctctgccagtgttacaaccaattaaccaattctgattagaaaaactcatcgagcatcaaatgaaactgcaatttattcatatcaggattatcaataccatatttttgaaaaagccgtttctgtaatgaaggagaaaactcaccgaggcagttccataggatggcaagatcctggtatcggtctgcgattccgactcgtccaacatcaatacaacctattaatttcccctcgtcaaaaataaggttatcaagtgagaaatcaccatgagtgacgactgaatccggtgagaatggcaaaagcttatgcatttctttccagacttgttcaacaggccagccattacgctcgtcatcaaaatcactcgcatcaaccaaaccgttattcattcgtgattgcgcctgagcgagacgaaatacgcgatcgctgttaaaaggacaattacaaacaggaatcgaatgcaaccggcgcaggaacactgccagcgcatcaacaatattttcacctgaatcaggatattcttctaatacctggaatgctgttttcccggggatcgcagtggtgagtaaccatgcatcatcaggagtacggataaaatgcttgatggtcggaagaggcataaattccgtcagccagtttagtctgaccatctcatctgtaacatcattggcaacgctacctttgccatgtttcagaaacaactctggcgcatcgggcttcccatacaatcgatagattgtcgcacctgattgcccgacattatcgcgagcccatttatacccatataaatcagcatccatgttggaatttaatcgcggcctcgagcaagacgtttcccgttgaatatggctcataacaccccttgtattactgtttatgtaagcagacagttttattgttcatgatgatatatttttatcttgtgcaatgtaacatcagagattttgagacacaacgtggctttccccccccccccattattgaagcatttatcagggttattgtctcatgagcggatacatatttgaatgtatttagaaaaataaacaaataggggttccgcgcacatttccccgaaaagtgccacctgacgtctaagaaaccattattatcatgacattaacctataaaaataggcgtatcacgaggccctttcgtc

SEQ ID NO: 177 - DNA, 1425 bp, Artificial Sequence
  Description of Artificial Sequence: Synthetic polynucleotide
atgggatggagctgtattattctgttcctggtggctaccgctaccggcgtgcattctcaggtccgactgtctcagagtggggggcagatgaagaaaccaggcgactcaatgcggatcagctgcagagcctccgggtacgagttcattaactgtcccatcaattggattcggctggctcccgggaagagacctgaatggatgggatggatgaaacctcgatttggagcagcttctgcagcaaggcagctgcagggacgagtgaccatgacacgagatatgtatagcgagaccgccttcctggaactgaggtctctgacaagtgacgatactgctgtctacttttgcaccaggggcaagtattgtacagcacgcgactactataactgggattttgagcactggggacagggcactcccgtgaccgtcagctccccgtcgaccaagggcccatcggtcttccccctggcaccctcctccaagagcacctctgggggcacagcggccctgggctgcctggtcaaggactacttccccgaacccgtgacggtgtcgtggaactcaggcgccctgaccagcggcgtgcacaccttcccggctgtcctacagtcctcaggactctactccctcagcagcgtggtgaccgtgccctccagcagcttgggcacccagacctacatctgcaacgtgaatcacaagcccagcaacaccaaggtggacaagaaagttgagcccaaatcttgtgacaaaactcacacatgcccaccgtgcccagcacctgaactcctggggggaccgtcagtcttcctcttccccccaaaacccaaggacaccctcatgatctcccggacccctgaggtcacatgcgtggtggtggacgtgagccacgaagaccctgaggtcaagttcaactggtacgtggacggcgtggaggtgcataatgccaagacaaagccgcgggaggagcagtacaacagcacgtaccgtgtggtcagcgtcctcaccgtcctgcaccaggactggctgaatggcaaggagtacaagtgcaaggtctccaacaaagccctcccagcccccatcgagaaaaccatctccaaagccaaagggcagccccgagaaccacaggtgtacaccctgcccccatcccgggatgagctgaccaagaaccaggtcagcctgacctgcctggtcaaaggcttctatcccagcgacatcgccgtggagtgggagagcaatgggcagccggagaacaactacaagaccacgcctcccgtgctggactccgacggctccttcttcctctacagcaagctcaccgtggacaagagcaggtggcagcaggggaacgtcttctcatgctccgtgatgcatgaggctctgcacaaccactacacgcagaagagcctctccctgtctccgggtaaatga

SEQ ID NO: 178 - DNA, 5837 bp, Artificial Sequence
  Description of Artificial Sequence: Synthetic polynucleotide
tcgcgcgtttcggtgatgacggtgaaaacctctgacacatgcagctcccggagacggtcacagcttgtctgtaagcggatgccgggagcagacaagcccgtcagggcgcgtcagcgggtgttggcgggtgtcggggctggcttaactatgcggcatcagagcagattgtactgagagtgcaccatatgcggtgtgaaataccgcacagatgcgtaaggagaaaataccgcatcagattggctattggccattgcatacgttgtatccatatcataatatgtacatttatattggctcatgtccaacattaccgccatgttgacattgattattgactagttattaatagtaatcaattacggggtcattagttcatagcccatatatggagttccgcgttacataacttacggtaaatggcccgcctggctgaccgcccaacgacccccgcccattgacgtcaataatgacgtatgttcccatagtaacgccaatagggactttccattgacgtcaatgggtggagtatttacggtaaactgcccacttggcagtacatcaagtgtatcatatgccaagtacgccccctattgacgtcaatgacggtaaatggcccgcctggcattatgcccagtacatgaccttatgggactttcctacttggcagtacatctacgtattagtcatcgctattaccatggtgatgcggttttggcagtacatcaatgggcgtggatagcggtttgactcacggggatttccaagtctccaccccattgacgtcaatgggagtttgttttggcaccaaaatcaacgggactttccaaaatgtcgtaacaactccgccccattgacgcaaatgggcggtaggcgtgtacggtgggaggtctatataagcagagctcgtttagtgaaccgtcagatcgcctggagacgccatccacgctgttttgacctccatagaagacaccgggaccgatccagcctccatcggctcgcatctctccttcacgcgcccgccgccctacctgaggccgccatccacgccggttgagtcgcgttctgccgcctcccgcctgtggtgcctcctgaactgcgtccgccgtctaggtaagtttaaagctcaggtcgagaccgggcctttgtccggcgctcccttggagcctacctagactcagccggctctccacgctttgcctgaccctgcttgctcaactctagttaacggtggagggcagtgtagtctgagcagtactcgttgctgccgcgcgcgccaccagacataatagctgacagactaacagactgttcctttccatgggtcttttctgcagtcaccgtcctcgacacgtgtgatcagatatcgcggccgctctagacaccatgggatggagctgtattattctgttcctggtggctaccgctaccggcgtgcattctcaggtccgactgtctcagagtggggggcagatgaagaaaccaggcgactcaatgcggatcagctgcagagcctccgggtacgagttcattaactgtcccatcaattggattcggctggctcccgggaagagacctgaatggatgggatggatgaaacctcgatttggagcagcttctgcagcaaggcagctgcagggacgagtgaccatgacacgagatatgtatagcgagaccgccttcctggaactgaggtctctgacaagtgacgatactgctgtctacttttgcaccaggggcaagtattgtacagcacgcgactactataactgggattttgagcactggggacagggcactcccgtgaccgtcagctccccgtcgaccaagggcccatcggtcttccccctggcaccctcctccaagagcacctctgggggcacagcggccctgggctgcctggtcaaggactacttccccgaacccgtgacggtgtcgtggaactcaggcgccctgaccagcggcgtgcacaccttcccggctgtcctacagtcctcaggactctactccctcagcagcgtggtgaccgtgccctccagcagcttgggcacccagacctacatctgcaacgtgaatcacaagcccagcaacaccaaggtggacaagaaagttgagcccaaatcttgtgacaaaactcacacatgcccaccgtgcccagcacctgaactcctggggggaccgtcagtcttcctcttccccccaaaacccaaggacaccctcatgatctcccggacccctgaggtcacatgcgtggtggtggacgtgagccacgaagaccctgaggtcaagttcaactggtacgtggacggcgtggaggtgcataatgccaagacaaagccgcgggaggagcagtacaacagcacgtaccgtgtggtcagcgtcctcaccgtcctgcaccaggactggctgaatggcaaggagtacaagtgcaaggtctccaacaaagccctcccagcccccatcgagaaaaccatctccaaagccaaagggcagccccgagaaccacaggtgtacaccctgcccccatcccgggatgagctgaccaagaaccaggtcagcctgacctgcctggtcaaaggcttctatcccagcgacatcgccgtggagtgggagagcaatgggcagccggagaacaactacaagaccacgcctcccgtgctggactccgacggctccttcttcctctacagcaagctcaccgtggacaagagcaggtggcagcaggggaacgtcttctcatgctccgtgatgcatgaggctctgcacaaccactacacgcagaagagcctctccctgtctccgggtaaatgatgaggatccagatctgctgtgccttctagttgccagccatctgttgtttgcccctcccccgtgccttccttgaccctggaaggtgccactcccactgtcctttcctaataaaatgaggaaattgcatcgcattgtctgagtaggtgtcattctattctggggggtggggtggggcaggacagcaagggggaggattgggaagacaatagcaggcatgctggggatgcggtgggctctatgggtacccaggtgctgaagaattgacccggttcctcctgggccagaaagaagcaggcacatccccttctctgtgacacaccctgtccacgcccctggttcttagttccagccccactcataggacactcatagctcaggagggctccgccttcaatcccacccgctaaagtacttggagcggtctctccctccctcatcagcccaccaaaccaaacctagcctccaagagtgggaagaaattaaagcaagataggctattaagtgcagagggagagaaaatgcctccaacatgtgaggaagtaatgagagaaatcatagaattttaaggccatgatttaaggccatcatggccttaatcttccgcttcctcgctcactgactcgctgcgctcggtcgttcggctgcggcgagcggtatcagctcactcaaaggcggtaatacggttatccacagaatcaggggataacgcaggaaagaacatgtgagcaaaaggccagcaaaaggccaggaaccgtaaaaaggccgcgttgctggcgtttttccataggctccgcccccctgacgagcatcacaaaaatcgacgctcaagtcagaggtggcgaaacccgacaggactataaagataccaggcgtttccccctggaagctccctcgtgcgctctcctgttccgaccctgccgcttaccggatacctgtccgcctttctcccttcgggaagcgtggcgctttctcatagctcacgctgtaggtatctcagttcggtgtaggtcgttcgctccaagctgggctgtgtgcacgaaccccccgttcagcccgaccgctgcgccttatccggtaactatcgtcttgagtccaacccggtaagacacgacttatcgccactggcagcagccactggtaacaggattagcagagcgaggtatgtaggcggtgctacagagttcttgaagtggtggcctaactacggctacactagaagaacagtatttggtatctgcgctctgctgaagccagttaccttcggaaaaagagttggtagctcttgatccggcaaacaaaccaccgctggtagcggtggtttttttgtttgcaagcagcagattacgcgcagaaaaaaaggatctcaagaagatcctttgatcttttctacggggtctgacgctcagtggaacgaaaactcacgttaagggattttggtcatgagattatcaaaaaggatcttcacctagatccttttaaattaaaaatgaagttttaaatcaatctaaagtatatatgagtaaacttggtctgacagttaccaatgcttaatcagtgaggcacctatctcagcgatctgtctatttcgttcatccatagttgcctgactcggggggggggggcgctgaggtctgcctcgtgaagaaggtgttgctgactcataccaggcctgaatcgccccatcatccagccagaaagtgagggagccacggttgatgagagctttgttgtaggtggaccagttggtgattttgaacttttgctttgccacggaacggtctgcgttgtcgggaagatgcgtgatctgatccttcaactcagcaaaagttcgatttattcaacaaagccgccgtcccgtcaagtcagcgtaatgctctgccagtgttacaaccaattaaccaattctgattagaaaaactcatcgagcatcaaatgaaactgcaatttattcatatcaggattatcaataccatatttttgaaaaagccgtttctgtaatgaaggagaaaactcaccgaggcagttccataggatggcaagatcctggtatcggtctgcgattccgactcgtccaacatcaatacaacctattaatttcccctcgtcaaaaataaggttatcaagtgagaaatcaccatgagtgacgactgaatccggtgagaatggcaaaagcttatgcatttctttccagacttgttcaacaggccagccattacgctcgtcatcaaaatcactcgcatcaaccaaaccgttattcattcgtgattgcgcctgagcgagacgaaatacgcgatcgctgttaaaaggacaattacaaacaggaatcgaatgcaaccggcgcaggaacactgccagcgcatcaacaatattttcacctgaatcaggatattcttctaatacctggaatgctgttttcccggggatcgcagtggtgagtaaccatgcatcatcaggagtacggataaaatgcttgatggtcggaagaggcataaattccgtcagccagtttagtctgaccatctcatctgtaacatcattggcaacgctacctttgccatgtttcagaaacaactctggcgcatcgggcttcccatacaatcgatagattgtcgcacctgattgcccgacattatcgcgagcccatttatacccatataaatcagcatccatgttggaatttaatcgcggcctcgagcaagacgtttcccgttgaatatggctcataacaccccttgtattactgtttatgtaagcagacagttttattgttcatgatgatatatttttatcttgtgcaatgtaacatcagagattttgagacacaacgtggctttccccccccccccattattgaagcatttatcagggttattgtctcatgagcggatacatatttgaatgtatttagaaaaataaacaaataggggttccgcgcacatttccccgaaaagtgccacctgacgtctaagaaaccattattatcatgacattaacctataaaaataggcgtatcacgaggccctttcgtc

SEQ ID NO: 179 - DNA, 1425 bp, Artificial Sequence
  Description of Artificial Sequence: Synthetic polynucleotide
atgggatggagctgtattattctgttcctggtggctaccgctaccggcgtgcattctcaggtccgactgtctcagagtggggggcagatgaagaaaccaggcgactcaatgcggatcagctgcagagcctccgggtacgagttcattaactgtcccatcaattggattcggctggctcccgggaagagacctgaatggatgggatggatgaaacctcgatggggagcagcttctgcagcaaggcagctgcagggacgagtgaccatgacacgagatatgtatagcgagaccgccttcctggaactgaggtctctgacaagtgacgatactgctgtctacttttgcaccaggggcaagtattgtacagcacgcgactactataactgggattttgagcactggggacagggcactcccgtgaccgtcagctccccgtcgaccaagggcccatcggtcttccccctggcaccctcctccaagagcacctctgggggcacagcggccctgggctgcctggtcaaggactacttccccgaacccgtgacggtgtcgtggaactcaggcgccctgaccagcggcgtgcacaccttcccggctgtcctacagtcctcaggactctactccctcagcagcgtggtgaccgtgccctccagcagcttgggcacccagacctacatctgcaacgtgaatcacaagcccagcaacaccaaggtggacaagaaagttgagcccaaatcttgtgacaaaactcacacatgcccaccgtgcccagcacctgaactcctggggggaccgtcagtcttcctcttccccccaaaacccaaggacaccctcatgatctcccggacccctgaggtcacatgcgtggtggtggacgtgagccacgaagaccctgaggtcaagttcaactggtacgtggacggcgtggaggtgcataatgccaagacaaagccgcgggaggagcagtacaacagcacgtaccgtgtggtcagcgtcctcaccgtcctgcaccaggactggctgaatggcaaggagtacaagtgcaaggtctccaacaaagccctcccagcccccatcgagaaaaccatctccaaagccaaagggcagccccgagaaccacaggtgtacaccctgcccccatcccgggatgagctgaccaagaaccaggtcagcctgacctgcctggtcaaaggcttctatcccagcgacatcgccgtggagtgggagagcaatgggcagccggagaacaactacaagaccacgcctcccgtgctggactccgacggctccttcttcctctacagcaagctcaccgtggacaagagcaggtggcagcaggggaacgtcttctcatgctccgtgatgcatgaggctctgcacaaccactacacgcagaagagcctctccctgtctccgggtaaatga

SEQ ID NO: 180 - DNA, 5837 bp, Artificial Sequence
  Description of Artificial Sequence: Synthetic polynucleotide
tcgcgcgtttcggtgatgacggtgaaaacctctgacacatgcagctcccggagacggtcacagcttgtctgtaagcggatgccgggagcagacaagcccgtcagggcgcgtcagcgggtgttggcgggtgtcggggctggcttaactatgcggcatcagagcagattgtactgagagtgcaccatatgcggtgtgaaataccgcacagatgcgtaaggagaaaataccgcatcagattggctattggccattgcatacgttgtatccatatcataatatgtacatttatattggctcatgtccaacattaccgccatgttgacattgattattgactagttattaatagtaatcaattacggggtcattagttcatagcccatatatggagttccgcgttacataacttacggtaaatggcccgcctggctgaccgcccaacgacccccgcccattgacgtcaataatgacgtatgttcccatagtaacgccaatagggactttccattgacgtcaatgggtggagtatttacggtaaactgcccacttggcagtacatcaagtgtatcatatgccaagtacgccccctattgacgtcaatgacggtaaatggcccgcctggcattatgcccagtacatgaccttatgggactttcctacttggcagtacatctacgtattagtcatcgctattaccatggtgatgcggttttggcagtacatcaatgggcgtggatagcggtttgactcacggggatttccaagtctccaccccattgacgtcaatgggagtttgttttggcaccaaaatcaacgggactttccaaaatgtcgtaacaactccgccccattgacgcaaatgggcggtaggcgtgtacggtgggaggtctatataagcagagctcgtttagtgaaccgtcagatcgcctggagacgccatccacgctgttttgacctccatagaagacaccgggaccgatccagcctccatcggctcgcatctctccttcacgcgcccgccgccctacctgaggccgccatccacgccggttgagtcgcgttctgccgcctcccgcctgtggtgcctcctgaactgcgtccgccgtctaggtaagtttaaagctcaggtcgagaccgggcctttgtccggcgctcccttggagcctacctagactcagccggctctccacgctttgcctgaccctgcttgctcaactctagttaacggtggagggcagtgtagtctgagcagtactcgttgctgccgcgcgcgccaccagacataatagctgacagactaacagactgttcctttccatgggtcttttctgcagtcaccgtcctcgacacgtgtgatcagatatcgcggccgctctagacaccatgggatggagctgtattattctgttcctggtggctaccgctaccggcgtgcattctcaggtccgactgtctcagagtggggggcagatgaagaaaccaggcgactcaatgcggatcagctgcagagcctccgggtacgagttcattaactgtcccatcaattggattcggctggctcccgggaagagacctgaatggatgggatggatgaaacctcgatggggagcagcttctgcagcaaggcagctgcagggacgagtgaccatgacacgagatatgtatagcgagaccgccttcctggaactgaggtctctgacaagtgacgatactgctgtctacttttgcaccaggggcaagtattgtacagcacgcgactactataactgggattttgagcactggggacagggcactcccgtgaccgtcagctccccgtcgaccaagggcccatcggtcttccccctggcaccctcctccaagagcacctctgggggcacagcggccctgggctgcctggtcaaggactacttccccgaacccgtgacggtgtcgtggaactcaggcgccctgaccagcggcgtgcacaccttcccggctgtcctacagtcctcaggactctactccctcagcagcgtggtgaccgtgccctccagcagcttgggcacccagacctacatctgcaacgtgaatcacaagcccagcaacaccaaggtggacaagaaagttgagcccaaatcttgtgacaaaactcacacatgcccaccgtgcccagcacctgaactcctggggggaccgtcagtcttcctcttccccccaaaacccaaggacaccctcatgatctcccggacccctgaggtcacatgcgtggtggtggacgtgagccacgaagaccctgaggtcaagttcaactggtacgtggacggcgtggaggtgcataatgccaagacaaagccgcgggaggagcagtacaacagcacgtaccgtgtggtcagcgtcctcaccgtcctgcaccaggactggctgaatggcaaggagtacaagtgcaaggtctccaacaaagccctcccagcccccatcgagaaaaccatctccaaagccaaagggcagccccgagaaccacaggtgtacaccctgcccccatcccgggatgagctgaccaagaaccaggtcagcctgacctgcctggtcaaaggcttctatcccagcgacatcgccgtggagtgggagagcaatgggcagccggagaacaactacaagaccacgcctcccgtgctggactccgacggctccttcttcctctacagcaagctcaccgtggacaagagcaggtggcagcaggggaacgtcttctcatgctccgtgatgcatgaggctctgcacaaccactacacgcagaagagcctctccctgtctccgggtaaatgatgaggatccagatctgctgtgccttctagttgccagccatctgttgtttgcccctcccccgtgccttccttgaccctggaaggtgccactcccactgtcctttcctaataaaatgaggaaattgcatcgcattgtctgagtaggtgtcattctattctggggggtggggtggggcaggacagcaagggggaggattgggaagacaatagcaggcatgctggggatgcggtgggctctatgggtacccaggtgctgaagaattgacccggttcctcctgggccagaaagaagcaggcacatccccttctctgtgacacaccctgtccacgcccctggttcttagttccagccccactcataggacactcatagctcaggagggctccgccttcaatcccacccgctaaagtacttggagcggtctctccctccctcatcagcccaccaaaccaaacctagcctccaagagtgggaagaaattaaagcaagataggctattaagtgcagagggagagaaaatgcctccaacatgtgaggaagtaatgagagaaatcatagaattttaaggccatgatttaaggccatcatggccttaatcttccgcttcctcgctcactgactcgctgcgctcggtcgttcggctgcggcgagcggtatcagctcactcaaaggcggtaatacggttatccacagaatcaggggataacgcaggaaagaacatgtgagcaaaaggccagcaaaaggccaggaaccgtaaaaaggccgcgttgctggcgtttttccataggctccgcccccctgacgagcatcacaaaaatcgacgctcaagtcagaggtggcgaaacccgacaggactataaagataccaggcgtttccccctggaagctccctcgtgcgctctcctgttccgaccctgccgcttaccggatacctgtccgcctttctcccttcgggaagcgtggcgctttctcatagctcacgctgtaggtatctcagttcggtgtaggtcgttcgctccaagctgggctgtgtgcacgaaccccccgttcagcccgaccgctgcgccttatccggtaactatcgtcttgagtccaacccggtaagacacgacttatcgccactggcagcagccactggtaacaggattagcagagcgaggtatgtaggcggtgctacagagttcttgaagtggtggcctaactacggctacactagaagaacagtatttggtatctgcgctctgctgaagccagttaccttcggaaaaagagttggtagctcttgatccggcaaacaaaccaccgctggtagcggtggtttttttgtttgcaagcagcagattacgcgcagaaaaaaaggatctcaagaagatcctttgatcttttctacggggtctgacgctcagtggaacgaaaactcacgttaagggattttggtcatgagattatcaaaaaggatcttcacctagatccttttaaattaaaaatgaagttttaaatcaatctaaagtatatatgagtaaacttggtctgacagttaccaatgcttaatcagtgaggcacctatctcagcgatctgtctatttcgttcatccatagttgcctgactcggggggggggggcgctgaggtctgcctcgtgaagaaggtgttgctgactcataccaggcctgaatcgccccatcatccagccagaaagtgagggagccacggttgatgagagctttgttgtaggtggaccagttggtgattttgaacttttgctttgccacggaacggtctgcgttgtcgggaagatgcgtgatctgatccttcaactcagcaaaagttcgatttattcaacaaagccgccgtcccgtcaagtcagcgtaatgctctgccagtgttacaaccaattaaccaattctgattagaaaaactcatcgagcatcaaatgaaactgcaatttattcatatcaggattatcaataccatatttttgaaaaagccgtttctgtaatgaaggagaaaactcaccgaggcagttccataggatggcaagatcctggtatcggtctgcgattccgactcgtccaacatcaatacaacctattaatttcccctcgtcaaaaataaggttatcaagtgagaaatcaccatgagtgacgactgaatccggtgagaatggcaaaagcttatgcatttctttccagacttgttcaacaggccagccattacgctcgtcatcaaaatcactcgcatcaaccaaaccgttattcattcgtgattgcgcctgagcgagacgaaatacgcgatcgctgttaaaaggacaattacaaacaggaatcgaatgcaaccggcgcaggaacactgccagcgcatcaacaatattttcacctgaatcaggatattcttctaatacctggaatgctgttttcccggggatcgcagtggtgagtaaccatgcatcatcaggagtacggataaaatgcttgatggtcggaagaggcataaattccgtcagccagtttagtctgaccatctcatctgtaacatcattggcaacgctacctttgccatgtttcagaaacaactctggcgcatcgggcttcccatacaatcgatagattgtcgcacctgattgcccgacattatcgcgagcccatttatacccatataaatcagcatccatgttggaatttaatcgcggcctcgagcaagacgtttcccgttgaatatggctcataacaccccttgtattactgtttatgtaagcagacagttttattgttcatgatgatatatttttatcttgtgcaatgtaacatcagagattttgagacacaacgtggctttccccccccccccattattgaagcatttatcagggttattgtctcatgagcggatacatatttgaatgtatttagaaaaataaacaaataggggttccgcgcacatttccccgaaaagtgccacctgacgtctaagaaaccattattatcatgacattaacctataaaaataggcgtatcacgaggccctttcgtc

SEQ ID NO: 181 - DNA, 1425 bp, Artificial Sequence
  Description of Artificial Sequence: Synthetic polynucleotide
atgggatggagctgtattattctgttcctggtggctaccgctaccggcgtgcattctcaggtccgactgtctcagagtggggggcagatgaagaaaccaggcgactcaatgcggatcagctgcagagcctccgggtacgagttcattaactgtcccatcaattggattcggctggctcccgggaagagacctgaatggatgggatggatgaaacctcgatatggagcagcttctgcagcaaggcagctgcagggacgagtgaccatgacacgagatatgtatagcgagaccgccttcctggaactgaggtctctgacaagtgacgatactgctgtctacttttgcaccaggggcaagtattgtacagcacgcgactactataactgggattttgagcactggggacagggcactcccgtgaccgtcagctccccgtcgaccaagggcccatcggtcttccccctggcaccctcctccaagagcacctctgggggcacagcggccctgggctgcctggtcaaggactacttccccgaacccgtgacggtgtcgtggaactcaggcgccctgaccagcggcgtgcacaccttcccggctgtcctacagtcctcaggactctactccctcagcagcgtggtgaccgtgccctccagcagcttgggcacccagacctacatctgcaacgtgaatcacaagcccagcaacaccaaggtggacaagaaagttgagcccaaatcttgtgacaaaactcacacatgcccaccgtgcccagcacctgaactcctggggggaccgtcagtcttcctcttccccccaaaacccaaggacaccctcatgatctcccggacccctgaggtcacatgcgtggtggtggacgtgagccacgaagaccctgaggtcaagttcaactggtacgtggacggcgtggaggtgcataatgccaagacaaagccgcgggaggagcagtacaacagcacgtaccgtgtggtcagcgtcctcaccgtcctgcaccaggactggctgaatggcaaggagtacaagtgcaaggtctccaacaaagccctcccagcccccatcgagaaaaccatctccaaagccaaagggcagccccgagaaccacaggtgtacaccctgcccccatcccgggatgagctgaccaagaaccaggtcagcctgacctgcctggtcaaaggcttctatcccagcgacatcgccgtggagtgggagagcaatgggcagccggagaacaactacaagaccacgcctcccgtgctggactccgacggctccttcttcctctacagcaagctcaccgtggacaagagcaggtggcagcaggggaacgtcttctcatgctccgtgatgcatgaggctctgcacaaccactacacgcagaagagcctctccctgtctccgggtaaatga

SEQ ID NO: 182 - DNA, 5837 bp, Artificial Sequence
  Description of Artificial Sequence: Synthetic polynucleotide
tcgcgcgtttcggtgatgacggtgaaaacctctgacacatgcagctcccggagacggtcacagcttgtctgtaagcggatgccgggagcagacaagcccgtcagggcgcgtcagcgggtgttggcgggtgtcggggctggcttaactatgcggcatcagagcagattgtactgagagtgcaccatatgcggtgtgaaataccgcacagatgcgtaaggagaaaataccgcatcagattggctattggccattgcatacgttgtatccatatcataatatgtacatttatattggctcatgtccaacattaccgccatgttgacattgattattgactagttattaatagtaatcaattacggggtcattagttcatagcccatatatggagttccgcgttacataacttacggtaaatggcccgcctggctgaccgcccaacgacccccgcccattgacgtcaataatgacgtatgttcccatagtaacgccaatagggactttccattgacgtcaatgggtggagtatttacggtaaactgcccacttggcagtacatcaagtgtatcatatgccaagtacgccccctattgacgtcaatgacggtaaatggcccgcctggcattatgcccagtacatgaccttatgggactttcctacttggcagtacatctacgtattagtcatcgctattaccatggtgatgcggttttggcagtacatcaatgggcgtggatagcggtttgactcacggggatttccaagtctccaccccattgacgtcaatgggagtttgttttggcaccaaaatcaacgggactttccaaaatgtcgtaacaactccgccccattgacgcaaatgggcggtaggcgtgtacggtgggaggtctatataagcagagctcgtttagtgaaccgtcagatcgcctggagacgccatccacgctgttttgacctccatagaagacaccgggaccgatccagcctccatcggctcgcatctctccttcacgcgcccgccgccctacctgaggccgccatccacgccggttgagtcgcgttctgccgcctcccgcctgtggtgcctcctgaactgcgtccgccgtctaggtaagtttaaagctcaggtcgagaccgggcctttgtccggcgctcccttggagcctacctagactcagccggctctccacgctttgcctgaccctgcttgctcaactctagttaacggtggagggcagtgtagtctgagcagtactcgttgctgccgcgcgcgccaccagacataatagctgacagactaacagactgttcctttccatgggtcttttctgcagtcaccgtcctcgacacgtgtgatcagatatcgcggccgctctagacaccatgggatggagctgtattattctgttcctggtggctaccgctaccggcgtgcattctcaggtccgactgtctcagagtggggggcagatgaagaaaccaggcgactcaatgcggatcagctgcagagcctccgggtacgagttcattaactgtcccatcaattggattcggctggctcccgggaagagacctgaatggatgggatggatgaaacctcgatatggagcagcttctgcagcaaggcagctgcagggacgagtgaccatgacacgagatatgtatagcgagaccgccttcctggaactgaggtctctgacaagtgacgatactgctgtctacttttgcaccaggggcaagtattgtacagcacgcgactactataactgggattttgagcactggggacagggcactcccgtgaccgtcagctccccgtcgaccaagggcccatcggtcttccccctggcaccctcctccaagagcacctctgggggcacagcggccctgggctgcctggtcaaggactacttccccgaacccgtgacggtgtcgtggaactcaggcgccctgaccagcggcgtgcacaccttcccggctgtcctacagtcctcaggactctactccctcagcagcgtggtgaccgtgccctccagcagcttgggcacccagacctacatctgcaacgtgaatcacaagcccagcaacaccaaggtggacaagaaagttgagcccaaatcttgtgacaaaactcacacatgcccaccgtgcccagcacctgaactcctggggggaccgtcagtcttcctcttccccccaaaacccaaggacaccctcatgatctcccggacccctgaggtcacatgcgtggtggtggacgtgagccacgaagaccctgaggtcaagttcaactggtacgtggacggcgtggaggtgcataatgccaagacaaagccgcgggaggagcagtacaacagcacgtaccgtgtggtcagcgtcctcaccgtcctgcaccaggactggctgaatggcaaggagtacaagtgcaaggtctccaacaaagccctcccagcccccatcgagaaaaccatctccaaagccaaagggcagccccgagaaccacaggtgtacaccctgcccccatcccgggatgagctgaccaagaaccaggtcagcctgacctgcctggtcaaaggcttctatcccagcgacatcgccgtggagtgggagagcaatgggcagccggagaacaactacaagaccacgcctcccgtgctggactccgacggctccttcttcctctacagcaagctcaccgtggacaagagcaggtggcagcaggggaacgtcttctcatgctccgtgatgcatgaggctctgcacaaccactacacgcagaagagcctctccctgtctccgggtaaatgatgaggatccagatctgctgtgccttctagttgccagccatctgttgtttgcccctcccccgtgccttccttgaccctggaaggtgccactcccactgtcctttcctaataaaatgaggaaattgcatcgcattgtctgagtaggtgtcattctattctggggggtggggtggggcaggacagcaagggggaggattgggaagacaatagcaggcatgctggggatgcggtgggctctatgggtacccaggtgctgaagaattgacccggttcctcctgggccagaaagaagcaggcacatccccttctctgtgacacaccctgtccacgcccctggttcttagttccagccccactcataggacactcatagctcaggagggctccgccttcaatcccacccgctaaagtacttggagcggtctctccctccctcatcagcccaccaaaccaaacctagcctccaagagtgggaagaaattaaagcaagataggctattaagtgcagagggagagaaaatgcctccaacatgtgaggaagtaatgagagaaatcatagaattttaaggccatgatttaaggccatcatggccttaatcttccgcttcctcgctcactgactcgctgcgctcggtcgttcggctgcggcgagcggtatcagctcactcaaaggcggtaatacggttatccacagaatcaggggataacgcaggaaagaacatgtgagcaaaaggccagcaaaaggccaggaaccgtaaaaaggccgcgttgctggcgtttttccataggctccgcccccctgacgagcatcacaaaaatcgacgctcaagtcagaggtggcgaaacccgacaggactataaagataccaggcgtttccccctggaagctccctcgtgcgctctcctgttccgaccctgccgcttaccggatacctgtccgcctttctcccttcgggaagcgtggcgctttctcatagctcacgctgtaggtatctcagttcggtgtaggtcgttcgctccaagctgggctgtgtgcacgaaccccccgttcagcccgaccgctgcgccttatccggtaactatcgtcttgagtccaacccggtaagacacgacttatcgccactggcagcagccactggtaacaggattagcagagcgaggtatgtaggcggtgctacagagttcttgaagtggtggcctaactacggctacactagaagaacagtatttggtatctgcgctctgctgaagccagttaccttcggaaaaagagttggtagctcttgatccggcaaacaaaccaccgctggtagcggtggtttttttgtttgcaagcagcagattacgcgcagaaaaaaaggatctcaagaagatcctttgatcttttctacggggtctgacgctcagtggaacgaaaactcacgttaagggattttggtcatgagattatcaaaaaggatcttcacctagatccttttaaattaaaaatgaagttttaaatcaatctaaagtatatatgagtaaacttggtctgacagttaccaatgcttaatcagtgaggcacctatctcagcgatctgtctatttcgttcatccatagttgcctgactcggggggggggggcgctgaggtctgcctcgtgaagaaggtgttgctgactcataccaggcctgaatcgccccatcatccagccagaaagtgagggagccacggttgatgagagctttgttgtaggtggaccagttggtgattttgaacttttgctttgccacggaacggtctgcgttgtcgggaagatgcgtgatctgatccttcaactcagcaaaagttcgatttattcaacaaagccgccgtcccgtcaagtcagcgtaatgctctgccagtgttacaaccaattaaccaattctgattagaaaaactcatcgagcatcaaatgaaactgcaatttattcatatcaggattatcaataccatatttttgaaaaagccgtttctgtaatgaaggagaaaactcaccgaggcagttccataggatggcaagatcctggtatcggtctgcgattccgactcgtccaacatcaatacaacctattaatttcccctcgtcaaaaataaggttatcaagtgagaaatcaccatgagtgacgactgaatccggtgagaatggcaaaagcttatgcatttctttccagacttgttcaacaggccagccattacgctcgtcatcaaaatcactcgcatcaaccaaaccgttattcattcgtgattgcgcctgagcgagacgaaatacgcgatcgctgttaaaaggacaattacaaacaggaatcgaatgcaaccggcgcaggaacactgccagcgcatcaacaatattttcacctgaatcaggatattcttctaatacctggaatgctgttttcccggggatcgcagtggtgagtaaccatgcatcatcaggagtacggataaaatgcttgatggtcggaagaggcataaattccgtcagccagtttagtctgaccatctcatctgtaacatcattggcaacgctacctttgccatgtttcagaaacaactctggcgcatcgggcttcccatacaatcgatagattgtcgcacctgattgcccgacattatcgcgagcccatttatacccatataaatcagcatccatgttggaatttaatcgcggcctcgagcaagacgtttcccgttgaatatggctcataacaccccttgtattactgtttatgtaagcagacagttttattgttcatgatgatatatttttatcttgtgcaatgtaacatcagagattttgagacacaacgtggctttccccccccccccattattgaagcatttatcagggttattgtctcatgagcggatacatatttgaatgtatttagaaaaataaacaaataggggttccgcgcacatttccccgaaaagtgccacctgacgtctaagaaaccattattatcatgacattaacctataaaaataggcgtatcacgaggccctttcgtc

SEQ ID NO: 183 - DNA, 1425 bp, Artificial Sequence
  Description of Artificial Sequence: Synthetic polynucleotide
atgggatggtcatgtatcattctgtttctggtcgctaccgctaccggagtgcatagtcaggtccagctggtccagtcaggagcacaggtgaagaaaccaggcgcttcagtgaaggtcagctgcaaagcatccgggtacgagttcatcaactgtcccattaattgggtccggcaggcaccaggacagagacctgaatggatgggatggatgaagccacgatttggagccgtgtcttatgctaggcagctgcagggccgcgtcaccatgacacgagacatgtacagctccaccgcctatctggagctgcggagactgacaagcgacgatactgcagtgtactattgcgccaggggcaaatactgtacagctcgcgactactataactgggattttgaacactggggacagggcactctggtgaccgtctctagtccgtcgaccaagggcccatcggtcttccccctggcaccctcctccaagagcacctctgggggcacagcggccctgggctgcctggtcaaggactacttccccgaacccgtgacggtgtcgtggaactcaggcgccctgaccagcggcgtgcacaccttcccggctgtcctacagtcctcaggactctactccctcagcagcgtggtgaccgtgccctccagcagcttgggcacccagacctacatctgcaacgtgaatcacaagcccagcaacaccaaggtggacaagaaagttgagcccaaatcttgtgacaaaactcacacatgcccaccgtgcccagcacctgaactcctggggggaccgtcagtcttcctcttccccccaaaacccaaggacaccctcatgatctcccggacccctgaggtcacatgcgtggtggtggacgtgagccacgaagaccctgaggtcaagttcaactggtacgtggacggcgtggaggtgcataatgccaagacaaagccgcgggaggagcagtacaacagcacgtaccgtgtggtcagcgtcctcaccgtcctgcaccaggactggctgaatggcaaggagtacaagtgcaaggtctccaacaaagccctcccagcccccatcgagaaaaccatctccaaagccaaagggcagccccgagaaccacaggtgtacaccctgcccccatcccgggatgagctgaccaagaaccaggtcagcctgacctgcctggtcaaaggcttctatcccagcgacatcgccgtggagtgggagagcaatgggcagccggagaacaactacaagaccacgcctcccgtgctggactccgacggctccttcttcctctacagcaagctcaccgtggacaagagcaggtggcagcaggggaacgtcttctcatgctccgtgatgcatgaggctctgcacaaccactacacgcagaagagcctctccctgtctccgggtaaatga

SEQ ID NO: 184 - DNA, 5837 bp, Artificial Sequence
  Description of Artificial Sequence: Synthetic polynucleotide
tcgcgcgtttcggtgatgacggtgaaaacctctgacacatgcagctcccggagacggtcacagcttgtctgtaagcggatgccgggagcagacaagcccgtcagggcgcgtcagcgggtgttggcgggtgtcggggctggcttaactatgcggcatcagagcagattgtactgagagtgcaccatatgcggtgtgaaataccgcacagatgcgtaaggagaaaataccgcatcagattggctattggccattgcatacgttgtatccatatcataatatgtacatttatattggctcatgtccaacattaccgccatgttgacattgattattgactagttattaatagtaatcaattacggggtcattagttcatagcccatatatggagttccgcgttacataacttacggtaaatggcccgcctggctgaccgcccaacgacccccgcccattgacgtcaataatgacgtatgttcccatagtaacgccaatagggactttccattgacgtcaatgggtggagtatttacggtaaactgcccacttggcagtacatcaagtgtatcatatgccaagtacgccccctattgacgtcaatgacggtaaatggcccgcctggcattatgcccagtacatgaccttatgggactttcctacttggcagtacatctacgtattagtcatcgctattaccatggtgatgcggttttggcagtacatcaatgggcgtggatagcggtttgactcacggggatttccaagtctccaccccattgacgtcaatgggagtttgttttggcaccaaaatcaacgggactttccaaaatgtcgtaacaactccgccccattgacgcaaatgggcggtaggcgtgtacggtgggaggtctatataagcagagctcgtttagtgaaccgtcagatcgcctggagacgccatccacgctgttttgacctccatagaagacaccgggaccgatccagcctccatcggctcgcatctctccttcacgcgcccgccgccctacctgaggccgccatccacgccggttgagtcgcgttctgccgcctcccgcctgtggtgcctcctgaactgcgtccgccgtctaggtaagtttaaagctcaggtcgagaccgggcctttgtccggcgctcccttggagcctacctagactcagccggctctccacgctttgcctgaccctgcttgctcaactctagttaacggtggagggcagtgtagtctgagcagtactcgttgctgccgcgcgcgccaccagacataatagctgacagactaacagactgttcctttccatgggtcttttctgcagtcaccgtcctcgacacgtgtgatcagatatcgcggccgctctagacaccatgggatggtcatgtatcattctgtttctggtcgctaccgctaccggagtgcatagtcaggtccagctggtccagtcaggagcacaggtgaagaaaccaggcgcttcagtgaaggtcagctgcaaagcatccgggtacgagttcatcaactgtcccattaattgggtccggcaggcaccaggacagagacctgaatggatgggatggatgaagccacgatttggagccgtgtcttatgctaggcagctgcagggccgcgtcaccatgacacgagacatgtacagctccaccgcctatctggagctgcggagactgacaagcgacgatactgcagtgtactattgcgccaggggcaaatactgtacagctcgcgactactataactgggattttgaacactggggacagggcactctggtgaccgtctctagtccgtcgaccaagggcccatcggtcttccccctggcaccctcctccaagagcacctctgggggcacagcggccctgggctgcctggtcaaggactacttccccgaacccgtgacggtgtcgtggaactcaggcgccctgaccagcggcgtgcacaccttcccggctgtcctacagtcctcaggactctactccctcagcagcgtggtgaccgtgccctccagcagcttgggcacccagacctacatctgcaacgtgaatcacaagcccagcaacaccaaggtggacaagaaagttgagcccaaatcttgtgacaaaactcacacatgcccaccgtgcccagcacctgaactcctggggggaccgtcagtcttcctcttccccccaaaacccaaggacaccctcatgatctcccggacccctgaggtcacatgcgtggtggtggacgtgagccacgaagaccctgaggtcaagttcaactggtacgtggacggcgtggaggtgcataatgccaagacaaagccgcgggaggagcagtacaacagcacgtaccgtgtggtcagcgtcctcaccgtcctgcaccaggactggctgaatggcaaggagtacaagtgcaaggtctccaacaaagccctcccagcccccatcgagaaaaccatctccaaagccaaagggcagccccgagaaccacaggtgtacaccctgcccccatcccgggatgagctgaccaagaaccaggtcagcctgacctgcctggtcaaaggcttctatcccagcgacatcgccgtggagtgggagagcaatgggcagccggagaacaactacaagaccacgcctcccgtgctggactccgacggctccttcttcctctacagcaagctcaccgtggacaagagcaggtggcagcaggggaacgtcttctcatgctccgtgatgcatgaggctctgcacaaccactacacgcagaagagcctctccctgtctccgggtaaatgatgaggatccagatctgctgtgccttctagttgccagccatctgttgtttgcccctcccccgtgccttccttgaccctggaaggtgccactcccactgtcctttcctaataaaatgaggaaattgcatcgcattgtctgagtaggtgtcattctattctggggggtggggtggggcaggacagcaagggggaggattgggaagacaatagcaggcatgctggggatgcggtgggctctatgggtacccaggtgctgaagaattgacccggttcctcctgggccagaaagaagcaggcacatccccttctctgtgacacaccctgtccacgcccctggttcttagttccagccccactcataggacactcatagctcaggagggctccgccttcaatcccacccgctaaagtacttggagcggtctctccctccctcatcagcccaccaaaccaaacctagcctccaagagtgggaagaaattaaagcaagataggctattaagtgcagagggagagaaaatgcctccaacatgtgaggaagtaatgagagaaatcatagaattttaaggccatgatttaaggccatcatggccttaatcttccgcttcctcgctcactgactcgctgcgctcggtcgttcggctgcggcgagcggtatcagctcactcaaaggcggtaatacggttatccacagaatcaggggataacgcaggaaagaacatgtgagcaaaaggccagcaaaaggccaggaaccgtaaaaaggccgcgttgctggcgtttttccataggctccgcccccctgacgagcatcacaaaaatcgacgctcaagtcagaggtggcgaaacccgacaggactataaagataccaggcgtttccccctggaagctccctcgtgcgctctcctgttccgaccctgccgcttaccggatacctgtccgcctttctcccttcgggaagcgtggcgctttctcatagctcacgctgtaggtatctcagttcggtgtaggtcgttcgctccaagctgggctgtgtgcacgaaccccccgttcagcccgaccgctgcgccttatccggtaactatcgtcttgagtccaacccggtaagacacgacttatcgccactggcagcagccactggtaacaggattagcagagcgaggtatgtaggcggtgctacagagttcttgaagtggtggcctaactacggctacactagaagaacagtatttggtatctgcgctctgctgaagccagttaccttcggaaaaagagttggtagctcttgatccggcaaacaaaccaccgctggtagcggtggtttttttgtttgcaagcagcagattacgcgcagaaaaaaaggatctcaagaagatcctttgatcttttctacggggtctgacgctcagtggaacgaaaactcacgttaagggattttggtcatgagattatcaaaaaggatcttcacctagatccttttaaattaaaaatgaagttttaaatcaatctaaagtatatatgagtaaacttggtctgacagttaccaatgcttaatcagtgaggcacctatctcagcgatctgtctatttcgttcatccatagttgcctgactcggggggggggggcgctgaggtctgcctcgtgaagaaggtgttgctgactcataccaggcctgaatcgccccatcatccagccagaaagtgagggagccacggttgatgagagctttgttgtaggtggaccagttggtgattttgaacttttgctttgccacggaacggtctgcgttgtcgggaagatgcgtgatctgatccttcaactcagcaaaagttcgatttattcaacaaagccgccgtcccgtcaagtcagcgtaatgctctgccagtgttacaaccaattaaccaattctgattagaaaaactcatcgagcatcaaatgaaactgcaatttattcatatcaggattatcaataccatatttttgaaaaagccgtttctgtaatgaaggagaaaactcaccgaggcagttccataggatggcaagatcctggtatcggtctgcgattccgactcgtccaacatcaatacaacctattaatttcccctcgtcaaaaataaggttatcaagtgagaaatcaccatgagtgacgactgaatccggtgagaatggcaaaagcttatgcatttctttccagacttgttcaacaggccagccattacgctcgtcatcaaaatcactcgcatcaaccaaaccgttattcattcgtgattgcgcctgagcgagacgaaatacgcgatcgctgttaaaaggacaattacaaacaggaatcgaatgcaaccggcgcaggaacactgccagcgcatcaacaatattttcacctgaatcaggatattcttctaatacctggaatgctgttttcccggggatcgcagtggtgagtaaccatgcatcatcaggagtacggataaaatgcttgatggtcggaagaggcataaattccgtcagccagtttagtctgaccatctcatctgtaacatcattggcaacgctacctttgccatgtttcagaaacaactctggcgcatcgggcttcccatacaatcgatagattgtcgcacctgattgcccgacattatcgcgagcccatttatacccatataaatcagcatccatgttggaatttaatcgcggcctcgagcaagacgtttcccgttgaatatggctcataacaccccttgtattactgtttatgtaagcagacagttttattgttcatgatgatatatttttatcttgtgcaatgtaacatcagagattttgagacacaacgtggctttccccccccccccattattgaagcatttatcagggttattgtctcatgagcggatacatatttgaatgtatttagaaaaataaacaaataggggttccgcgcacatttccccgaaaagtgccacctgacgtctaagaaaccattattatcatgacattaacctataaaaataggcgtatcacgaggccctttcgtc

SEQ ID NO: 185 - DNA, 1425 bp, Artificial Sequence
  Description of Artificial Sequence: Synthetic polynucleotide
atgggatggtcatgtatcattctgtttctggtcgctaccgctaccggagtgcatagtcaggtccagctggtccagtcaggagcacaggtgaagaaaccaggcgcttcagtgaaggtcagctgcaaagcatccgggtacgagttcatcaactgtcccattaattgggtccggcaggcaccaggacagagacctgaatggatgggatggatgaagccacgatggggagccgtgtcttatgctaggcagctgcagggccgcgtcaccatgacacgagacatgtacagctccaccgcctatctggagctgcggagactgacaagcgacgatactgcagtgtactattgcgccaggggcaaatactgtacagctcgcgactactataactgggattttgaacactggggacagggcactctggtgaccgtctctagtccgtcgaccaagggcccatcggtcttccccctggcaccctcctccaagagcacctctgggggcacagcggccctgggctgcctggtcaaggactacttccccgaacccgtgacggtgtcgtggaactcaggcgccctgaccagcggcgtgcacaccttcccggctgtcctacagtcctcaggactctactccctcagcagcgtggtgaccgtgccctccagcagcttgggcacccagacctacatctgcaacgtgaatcacaagcccagcaacaccaaggtggacaagaaagttgagcccaaatcttgtgacaaaactcacacatgcccaccgtgcccagcacctgaactcctggggggaccgtcagtcttcctcttccccccaaaacccaaggacaccctcatgatctcccggacccctgaggtcacatgcgtggtggtggacgtgagccacgaagaccctgaggtcaagttcaactggtacgtggacggcgtggaggtgcataatgccaagacaaagccgcgggaggagcagtacaacagcacgtaccgtgtggtcagcgtcctcaccgtcctgcaccaggactggctgaatggcaaggagtacaagtgcaaggtctccaacaaagccctcccagcccccatcgagaaaaccatctccaaagccaaagggcagccccgagaaccacaggtgtacaccctgcccccatcccgggatgagctgaccaagaaccaggtcagcctgacctgcctggtcaaaggcttctatcccagcgacatcgccgtggagtgggagagcaatgggcagccggagaacaactacaagaccacgcctcccgtgctggactccgacggctccttcttcctctacagcaagctcaccgtggacaagagcaggtggcagcaggggaacgtcttctcatgctccgtgatgcatgaggctctgcacaaccactacacgcagaagagcctctccctgtctccgggtaaatga

SEQ ID NO: 186 - DNA, 5837 bp, Artificial Sequence
  Description of Artificial Sequence: Synthetic polynucleotide
tcgcgcgtttcggtgatgacggtgaaaacctctgacacatgcagctcccggagacggtcacagcttgtctgtaagcggatgccgggagcagacaagcccgtcagggcgcgtcagcgggtgttggcgggtgtcggggctggcttaactatgcggcatcagagcagattgtactgagagtgcaccatatgcggtgtgaaataccgcacagatgcgtaaggagaaaataccgcatcagattggctattggccattgcatacgttgtatccatatcataatatgtacatttatattggctcatgtccaacattaccgccatgttgacattgattattgactagttattaatagtaatcaattacggggtcattagttcatagcccatatatggagttccgcgttacataacttacggtaaatggcccgcctggctgaccgcccaacgacccccgcccattgacgtcaataatgacgtatgttcccatagtaacgccaatagggactttccattgacgtcaatgggtggagtatttacggtaaactgcccacttggcagtacatcaagtgtatcatatgccaagtacgccccctattgacgtcaatgacggtaaatggcccgcctggcattatgcccagtacatgaccttatgggactttcctacttggcagtacatctacgtattagtcatcgctattaccatggtgatgcggttttggcagtacatcaatgggcgtggatagcggtttgactcacggggatttccaagtctccaccccattgacgtcaatgggagtttgttttggcaccaaaatcaacgggactttccaaaatgtcgtaacaactccgccccattgacgcaaatgggcggtaggcgtgtacggtgggaggtctatataagcagagctcgtttagtgaaccgtcagatcgcctggagacgccatccacgctgttttgacctccatagaagacaccgggaccgatccagcctccatcggctcgcatctctccttcacgcgcccgccgccctacctgaggccgccatccacgccggttgagtcgcgttctgccgcctcccgcctgtggtgcctcctgaactgcgtccgccgtctaggtaagtttaaagctcaggtcgagaccgggcctttgtccggcgctcccttggagcctacctagactcagccggctctccacgctttgcctgaccctgcttgctcaactctagttaacggtggagggcagtgtagtctgagcagtactcgttgctgccgcgcgcgccaccagacataatagctgacagactaacagactgttcctttccatgggtcttttctgcagtcaccgtcctcgacacgtgtgatcagatatcgcggccgctctagacaccatgggatggtcatgtatcattctgtttctggtcgctaccgctaccggagtgcatagtcaggtccagctggtccagtcaggagcacaggtgaagaaaccaggcgcttcagtgaaggtcagctgcaaagcatccgggtacgagttcatcaactgtcccattaattgggtccggcaggcaccaggacagagacctgaatggatgggatggatgaagccacgatggggagccgtgtcttatgctaggcagctgcagggccgcgtcaccatgacacgagacatgtacagctccaccgcctatctggagctgcggagactgacaagcgacgatactgcagtgtactattgcgccaggggcaaatactgtacagctcgcgactactataactgggattttgaacactggggacagggcactctggtgaccgtctctagtccgtcgaccaagggcccatcggtcttccccctggcaccctcctccaagagcacctctgggggcacagcggccctgggctgcctggtcaaggactacttccccgaacccgtgacggtgtcgtggaactcaggcgccctgaccagcggcgtgcacaccttcccggctgtcctacagtcctcaggactctactccctcagcagcgtggtgaccgtgccctccagcagcttgggcacccagacctacatctgcaacgtgaatcacaagcccagcaacaccaaggtggacaagaaagttgagcccaaatcttgtgacaaaactcacacatgcccaccgtgcccagcacctgaactcctggggggaccgtcagtcttcctcttccccccaaaacccaaggacaccctcatgatctcccggacccctgaggtcacatgcgtggtggtggacgtgagccacgaagaccctgaggtcaagttcaactggtacgtggacggcgtggaggtgcataatgccaagacaaagccgcgggaggagcagtacaacagcacgtaccgtgtggtcagcgtcctcaccgtcctgcaccaggactggctgaatggcaaggagtacaagtgcaaggtctccaacaaagccctcccagcccccatcgagaaaaccatctccaaagccaaagggcagccccgagaaccacaggtgtacaccctgcccccatcccgggatgagctgaccaagaaccaggtcagcctgacctgcctggtcaaaggcttctatcccagcgacatcgccgtggagtgggagagcaatgggcagccggagaacaactacaagaccacgcctcccgtgctggactccgacggctccttcttcctctacagcaagctcaccgtggacaagagcaggtggcagcaggggaacgtcttctcatgctccgtgatgcatgaggctctgcacaaccactacacgcagaagagcctctccctgtctccgggtaaatgatgaggatccagatctgctgtgccttctagttgccagccatctgttgtttgcccctcccccgtgccttccttgaccctggaaggtgccactcccactgtcctttcctaataaaatgaggaaattgcatcgcattgtctgagtaggtgtcattctattctggggggtggggtggggcaggacagcaagggggaggattgggaagacaatagcaggcatgctggggatgcggtgggctctatgggtacccaggtgctgaagaattgacccggttcctcctgggccagaaagaagcaggcacatccccttctctgtgacacaccctgtccacgcccctggttcttagttccagccccactcataggacactcatagctcaggagggctccgccttcaatcccacccgctaaagtacttggagcggtctctccctccctcatcagcccaccaaaccaaacctagcctccaagagtgggaagaaattaaagcaagataggctattaagtgcagagggagagaaaatgcctccaacatgtgaggaagtaatgagagaaatcatagaattttaaggccatgatttaaggccatcatggccttaatcttccgcttcctcgctcactgactcgctgcgctcggtcgttcggctgcggcgagcggtatcagctcactcaaaggcggtaatacggttatccacagaatcaggggataacgcaggaaagaacatgtgagcaaaaggccagcaaaaggccaggaaccgtaaaaaggccgcgttgctggcgtttttccataggctccgcccccctgacgagcatcacaaaaatcgacgctcaagtcagaggtggcgaaacccgacaggactataaagataccaggcgtttccccctggaagctccctcgtgcgctctcctgttccgaccctgccgcttaccggatacctgtccgcctttctcccttcgggaagcgtggcgctttctcatagctcacgctgtaggtatctcagttcggtgtaggtcgttcgctccaagctgggctgtgtgcacgaaccccccgttcagcccgaccgctgcgccttatccggtaactatcgtcttgagtccaacccggtaagacacgacttatcgccactggcagcagccactggtaacaggattagcagagcgaggtatgtaggcggtgctacagagttcttgaagtggtggcctaactacggctacactagaagaacagtatttggtatctgcgctctgctgaagccagttaccttcggaaaaagagttggtagctcttgatccggcaaacaaaccaccgctggtagcggtggtttttttgtttgcaagcagcagattacgcgcagaaaaaaaggatctcaagaagatcctttgatcttttctacggggtctgacgctcagtggaacgaaaactcacgttaagggattttggtcatgagattatcaaaaaggatcttcacctagatccttttaaattaaaaatgaagttttaaatcaatctaaagtatatatgagtaaacttggtctgacagttaccaatgcttaatcagtgaggcacctatctcagcgatctgtctatttcgttcatccatagttgcctgactcggggggggggggcgctgaggtctgcctcgtgaagaaggtgttgctgactcataccaggcctgaatcgccccatcatccagccagaaagtgagggagccacggttgatgagagctttgttgtaggtggaccagttggtgattttgaacttttgctttgccacggaacggtctgcgttgtcgggaagatgcgtgatctgatccttcaactcagcaaaagttcgatttattcaacaaagccgccgtcccgtcaagtcagcgtaatgctctgccagtgttacaaccaattaaccaattctgattagaaaaactcatcgagcatcaaatgaaactgcaatttattcatatcaggattatcaataccatatttttgaaaaagccgtttctgtaatgaaggagaaaactcaccgaggcagttccataggatggcaagatcctggtatcggtctgcgattccgactcgtccaacatcaatacaacctattaatttcccctcgtcaaaaataaggttatcaagtgagaaatcaccatgagtgacgactgaatccggtgagaatggcaaaagcttatgcatttctttccagacttgttcaacaggccagccattacgctcgtcatcaaaatcactcgcatcaaccaaaccgttattcattcgtgattgcgcctgagcgagacgaaatacgcgatcgctgttaaaaggacaattacaaacaggaatcgaatgcaaccggcgcaggaacactgccagcgcatcaacaatattttcacctgaatcaggatattcttctaatacctggaatgctgttttcccggggatcgcagtggtgagtaaccatgcatcatcaggagtacggataaaatgcttgatggtcggaagaggcataaattccgtcagccagtttagtctgaccatctcatctgtaacatcattggcaacgctacctttgccatgtttcagaaacaactctggcgcatcgggcttcccatacaatcgatagattgtcgcacctgattgcccgacattatcgcgagcccatttatacccatataaatcagcatccatgttggaatttaatcgcggcctcgagcaagacgtttcccgttgaatatggctcataacaccccttgtattactgtttatgtaagcagacagttttattgttcatgatgatatatttttatcttgtgcaatgtaacatcagagattttgagacacaacgtggctttccccccccccccattattgaagcatttatcagggttattgtctcatgagcggatacatatttgaatgtatttagaaaaataaacaaataggggttccgcgcacatttccccgaaaagtgccacctgacgtctaagaaaccattattatcatgacattaacctataaaaataggcgtatcacgaggccctttcgtc

SEQ ID NO: 187 - DNA, 1425 bp, Artificial Sequence
  Description of Artificial Sequence: Synthetic polynucleotide
atgggatggtcatgtatcattctgtttctggtcgctaccgctaccggagtgcatagtcaggtccagctggtccagtcaggagcacaggtgaagaaaccaggcgcttcagtgaaggtcagctgcaaagcatccgggtacgagttcatcaactgtcccattaattgggtccggcaggcaccaggacagagacctgaatggatgggatggatgaagccacgatatggagccgtgtcttatgctaggcagctgcagggccgcgtcaccatgacacgagacatgtacagctccaccgcctatctggagctgcggagactgacaagcgacgatactgcagtgtactattgcgccaggggcaaatactgtacagctcgcgactactataactgggattttgaacactggggacagggcactctggtgaccgtctctagtccgtcgaccaagggcccatcggtcttccccctggcaccctcctccaagagcacctctgggggcacagcggccctgggctgcctggtcaaggactacttccccgaacccgtgacggtgtcgtggaactcaggcgccctgaccagcggcgtgcacaccttcccggctgtcctacagtcctcaggactctactccctcagcagcgtggtgaccgtgccctccagcagcttgggcacccagacctacatctgcaacgtgaatcacaagcccagcaacaccaaggtggacaagaaagttgagcccaaatcttgtgacaaaactcacacatgcccaccgtgcccagcacctgaactcctggggggaccgtcagtcttcctcttccccccaaaacccaaggacaccctcatgatctcccggacccctgaggtcacatgcgtggtggtggacgtgagccacgaagaccctgaggtcaagttcaactggtacgtggacggcgtggaggtgcataatgccaagacaaagccgcgggaggagcagtacaacagcacgtaccgtgtggtcagcgtcctcaccgtcctgcaccaggactggctgaatggcaaggagtacaagtgcaaggtctccaacaaagccctcccagcccccatcgagaaaaccatctccaaagccaaagggcagccccgagaaccacaggtgtacaccctgcccccatcccgggatgagctgaccaagaaccaggtcagcctgacctgcctggtcaaaggcttctatcccagcgacatcgccgtggagtgggagagcaatgggcagccggagaacaactacaagaccacgcctcccgtgctggactccgacggctccttcttcctctacagcaagctcaccgtggacaagagcaggtggcagcaggggaacgtcttctcatgctccgtgatgcatgaggctctgcacaaccactacacgcagaagagcctctccctgtctccgggtaaatga

SEQ ID NO: 188 - DNA, 5837 bp, Artificial Sequence
  Description of Artificial Sequence: Synthetic polynucleotide
tcgcgcgtttcggtgatgacggtgaaaacctctgacacatgcagctcccggagacggtcacagcttgtctgtaagcggatgccgggagcagacaagcccgtcagggcgcgtcagcgggtgttggcgggtgtcggggctggcttaactatgcggcatcagagcagattgtactgagagtgcaccatatgcggtgtgaaataccgcacagatgcgtaaggagaaaataccgcatcagattggctattggccattgcatacgttgtatccatatcataatatgtacatttatattggctcatgtccaacattaccgccatgttgacattgattattgactagttattaatagtaatcaattacggggtcattagttcatagcccatatatggagttccgcgttacataacttacggtaaatggcccgcctggctgaccgcccaacgacccccgcccattgacgtcaataatgacgtatgttcccatagtaacgccaatagggactttccattgacgtcaatgggtggagtatttacggtaaactgcccacttggcagtacatcaagtgtatcatatgccaagtacgccccctattgacgtcaatgacggtaaatggcccgcctggcattatgcccagtacatgaccttatgggactttcctacttggcagtacatctacgtattagtcatcgctattaccatggtgatgcggttttggcagtacatcaatgggcgtggatagcggtttgactcacggggatttccaagtctccaccccattgacgtcaatgggagtttgttttggcaccaaaatcaacgggactttccaaaatgtcgtaacaactccgccccattgacgcaaatgggcggtaggcgtgtacggtgggaggtctatataagcagagctcgtttagtgaaccgtcagatcgcctggagacgccatccacgctgttttgacctccatagaagacaccgggaccgatccagcctccatcggctcgcatctctccttcacgcgcccgccgccctacctgaggccgccatccacgccggttgagtcgcgttctgccgcctcccgcctgtggtgcctcctgaactgcgtccgccgtctaggtaagtttaaagctcaggtcgagaccgggcctttgtccggcgctcccttggagcctacctagactcagccggctctccacgctttgcctgaccctgcttgctcaactctagttaacggtggagggcagtgtagtctgagcagtactcgttgctgccgcgcgcgccaccagacataatagctgacagactaacagactgttcctttccatgggtcttttctgcagtcaccgtcctcgacacgtgtgatcagatatcgcggccgctctagacaccatgggatggtcatgtatcattctgtttctggtcgctaccgctaccggagtgcatagtcaggtccagctggtccagtcaggagcacaggtgaagaaaccaggcgcttcagtgaaggtcagctgcaaagcatccgggtacgagttcatcaactgtcccattaattgggtccggcaggcaccaggacagagacctgaatggatgggatggatgaagccacgatatggagccgtgtcttatgctaggcagctgcagggccgcgtcaccatgacacgagacatgtacagctccaccgcctatctggagctgcggagactgacaagcgacgatactgcagtgtactattgcgccaggggcaaatactgtacagctcgcgactactataactgggattttgaacactggggacagggcactctggtgaccgtctctagtccgtcgaccaagggcccatcggtcttccccctggcaccctcctccaagagcacctctgggggcacagcggccctgggctgcctggtcaaggactacttccccgaacccgtgacggtgtcgtggaactcaggcgccctgaccagcggcgtgcacaccttcccggctgtcctacagtcctcaggactctactccctcagcagcgtggtgaccgtgccctccagcagcttgggcacccagacctacatctgcaacgtgaatcacaagcccagcaacaccaaggtggacaagaaagttgagcccaaatcttgtgacaaaactcacacatgcccaccgtgcccagcacctgaactcctggggggaccgtcagtcttcctcttccccccaaaacccaaggacaccctcatgatctcccggacccctgaggtcacatgcgtggtggtggacgtgagccacgaagaccctgaggtcaagttcaactggtacgtggacggcgtggaggtgcataatgccaagacaaagccgcgggaggagcagtacaacagcacgtaccgtgtggtcagcgtcctcaccgtcctgcaccaggactggctgaatggcaaggagtacaagtgcaaggtctccaacaaagccctcccagcccccatcgagaaaaccatctccaaagccaaagggcagccccgagaaccacaggtgtacaccctgcccccatcccgggatgagctgaccaagaaccaggtcagcctgacctgcctggtcaaaggcttctatcccagcgacatcgccgtggagtgggagagcaatgggcagccggagaacaactacaagaccacgcctcccgtgctggactccgacggctccttcttcctctacagcaagctcaccgtggacaagagcaggtggcagcaggggaacgtcttctcatgctccgtgatgcatgaggctctgcacaaccactacacgcagaagagcctctccctgtctccgggtaaatgatgaggatccagatctgctgtgccttctagttgccagccatctgttgtttgcccctcccccgtgccttccttgaccctggaaggtgccactcccactgtcctttcctaataaaatgaggaaattgcatcgcattgtctgagtaggtgtcattctattctggggggtggggtggggcaggacagcaagggggaggattgggaagacaatagcaggcatgctggggatgcggtgggctctatgggtacccaggtgctgaagaattgacccggttcctcctgggccagaaagaagcaggcacatccccttctctgtgacacaccctgtccacgcccctggttcttagttccagccccactcataggacactcatagctcaggagggctccgccttcaatcccacccgctaaagtacttggagcggtctctccctccctcatcagcccaccaaaccaaacctagcctccaagagtgggaagaaattaaagcaagataggctattaagtgcagagggagagaaaatgcctccaacatgtgaggaagtaatgagagaaatcatagaattttaaggccatgatttaaggccatcatggccttaatcttccgcttcctcgctcactgactcgctgcgctcggtcgttcggctgcggcgagcggtatcagctcactcaaaggcggtaatacggttatccacagaatcaggggataacgcaggaaagaacatgtgagcaaaaggccagcaaaaggccaggaaccgtaaaaaggccgcgttgctggcgtttttccataggctccgcccccctgacgagcatcacaaaaatcgacgctcaagtcagaggtggcgaaacccgacaggactataaagataccaggcgtttccccctggaagctccctcgtgcgctctcctgttccgaccctgccgcttaccggatacctgtccgcctttctcccttcgggaagcgtggcgctttctcatagctcacgctgtaggtatctcagttcggtgtaggtcgttcgctccaagctgggctgtgtgcacgaaccccccgttcagcccgaccgctgcgccttatccggtaactatcgtcttgagtccaacccggtaagacacgacttatcgccactggcagcagccactggtaacaggattagcagagcgaggtatgtaggcggtgctacagagttcttgaagtggtggcctaactacggctacactagaagaacagtatttggtatctgcgctctgctgaagccagttaccttcggaaaaagagttggtagctcttgatccggcaaacaaaccaccgctggtagcggtggtttttttgtttgcaagcagcagattacgcgcagaaaaaaaggatctcaagaagatcctttgatcttttctacggggtctgacgctcagtggaacgaaaactcacgttaagggattttggtcatgagattatcaaaaaggatcttcacctagatccttttaaattaaaaatgaagttttaaatcaatctaaagtatatatgagtaaacttggtctgacagttaccaatgcttaatcagtgaggcacctatctcagcgatctgtctatttcgttcatccatagttgcctgactcggggggggggggcgctgaggtctgcctcgtgaagaaggtgttgctgactcataccaggcctgaatcgccccatcatccagccagaaagtgagggagccacggttgatgagagctttgttgtaggtggaccagttggtgattttgaacttttgctttgccacggaacggtctgcgttgtcgggaagatgcgtgatctgatccttcaactcagcaaaagttcgatttattcaacaaagccgccgtcccgtcaagtcagcgtaatgctctgccagtgttacaaccaattaaccaattctgattagaaaaactcatcgagcatcaaatgaaactgcaatttattcatatcaggattatcaataccatatttttgaaaaagccgtttctgtaatgaaggagaaaactcaccgaggcagttccataggatggcaagatcctggtatcggtctgcgattccgactcgtccaacatcaatacaacctattaatttcccctcgtcaaaaataaggttatcaagtgagaaatcaccatgagtgacgactgaatccggtgagaatggcaaaagcttatgcatttctttccagacttgttcaacaggccagccattacgctcgtcatcaaaatcactcgcatcaaccaaaccgttattcattcgtgattgcgcctgagcgagacgaaatacgcgatcgctgttaaaaggacaattacaaacaggaatcgaatgcaaccggcgcaggaacactgccagcgcatcaacaatattttcacctgaatcaggatattcttctaatacctggaatgctgttttcccggggatcgcagtggtgagtaaccatgcatcatcaggagtacggataaaatgcttgatggtcggaagaggcataaattccgtcagccagtttagtctgaccatctcatctgtaacatcattggcaacgctacctttgccatgtttcagaaacaactctggcgcatcgggcttcccatacaatcgatagattgtcgcacctgattgcccgacattatcgcgagcccatttatacccatataaatcagcatccatgttggaatttaatcgcggcctcgagcaagacgtttcccgttgaatatggctcataacaccccttgtattactgtttatgtaagcagacagttttattgttcatgatgatatatttttatcttgtgcaatgtaacatcagagattttgagacacaacgtggctttccccccccccccattattgaagcatttatcagggttattgtctcatgagcggatacatatttgaatgtatttagaaaaataaacaaataggggttccgcgcacatttccccgaaaagtgccacctgacgtctaagaaaccattattatcatgacattaacctataaaaataggcgtatcacgaggccctttcgtc

SEQ ID NO: 189 - DNA, 1425 bp, Artificial Sequence
  Description of Artificial Sequence: Synthetic polynucleotide
atgggatggtcttgtattattctgtttctggtcgcaaccgccacaggggtccactctcaggtgcagctggtccagtccggggctcaggtgaagaaaccaggcgactcagtgaaggtcagctgcaaagcttccgggtacgagttcatcaactgtcccattaattgggtccggctggcaccaggacagagacctgaatggatgggatggatgaagccacgatttggagccgtgtcttatgctaggcagctgcagggccgcgtcaccatgacacgagatatgtacagctccaccgcctatctggagctgcggagactgacaagcgacgatactgcagtgtactattgcgccaggggcaaatactgtacagctcgcgactactataactgggattttgaacactggggacagggcactctggtgaccgtctctagtccgtcgaccaagggcccatcggtcttccccctggcaccctcctccaagagcacctctgggggcacagcggccctgggctgcctggtcaaggactacttccccgaacccgtgacggtgtcgtggaactcaggcgccctgaccagcggcgtgcacaccttcccggctgtcctacagtcctcaggactctactccctcagcagcgtggtgaccgtgccctccagcagcttgggcacccagacctacatctgcaacgtgaatcacaagcccagcaacaccaaggtggacaagaaagttgagcccaaatcttgtgacaaaactcacacatgcccaccgtgcccagcacctgaactcctggggggaccgtcagtcttcctcttccccccaaaacccaaggacaccctcatgatctcccggacccctgaggtcacatgcgtggtggtggacgtgagccacgaagaccctgaggtcaagttcaactggtacgtggacggcgtggaggtgcataatgccaagacaaagccgcgggaggagcagtacaacagcacgtaccgtgtggtcagcgtcctcaccgtcctgcaccaggactggctgaatggcaaggagtacaagtgcaaggtctccaacaaagccctcccagcccccatcgagaaaaccatctccaaagccaaagggcagccccgagaaccacaggtgtacaccctgcccccatcccgggatgagctgaccaagaaccaggtcagcctgacctgcctggtcaaaggcttctatcccagcgacatcgccgtggagtgggagagcaatgggcagccggagaacaactacaagaccacgcctcccgtgctggactccgacggctccttcttcctctacagcaagctcaccgtggacaagagcaggtggcagcaggggaacgtcttctcatgctccgtgatgcatgaggctctgcacaaccactacacgcagaagagcctctccctgtctccgggtaaatga

SEQ ID NO: 190 - DNA, 5837 bp, Artificial Sequence
  Description of Artificial Sequence: Synthetic polynucleotide
tcgcgcgtttcggtgatgacggtgaaaacctctgacacatgcagctcccggagacggtcacagcttgtctgtaagcggatgccgggagcagacaagcccgtcagggcgcgtcagcgggtgttggcgggtgtcggggctggcttaactatgcggcatcagagcagattgtactgagagtgcaccatatgcggtgtgaaataccgcacagatgcgtaaggagaaaataccgcatcagattggctattggccattgcatacgttgtatccatatcataatatgtacatttatattggctcatgtccaacattaccgccatgttgacattgattattgactagttattaatagtaatcaattacggggtcattagttcatagcccatatatggagttccgcgttacataacttacggtaaatggcccgcctggctgaccgcccaacgacccccgcccattgacgtcaataatgacgtatgttcccatagtaacgccaatagggactttccattgacgtcaatgggtggagtatttacggtaaactgcccacttggcagtacatcaagtgtatcatatgccaagtacgccccctattgacgtcaatgacggtaaatggcccgcctggcattatgcccagtacatgaccttatgggactttcctacttggcagtacatctacgtattagtcatcgctattaccatggtgatgcggttttggcagtacatcaatgggcgtggatagcggtttgactcacggggatttccaagtctccaccccattgacgtcaatgggagtttgttttggcaccaaaatcaacgggactttccaaaatgtcgtaacaactccgccccattgacgcaaatgggcggtaggcgtgtacggtgggaggtctatataagcagagctcgtttagtgaaccgtcagatcgcctggagacgccatccacgctgttttgacctccatagaagacaccgggaccgatccagcctccatcggctcgcatctctccttcacgcgcccgccgccctacctgaggccgccatccacgccggttgagtcgcgttctgccgcctcccgcctgtggtgcctcctgaactgcgtccgccgtctaggtaagtttaaagctcaggtcgagaccgggcctttgtccggcgctcccttggagcctacctagactcagccggctctccacgctttgcctgaccctgcttgctcaactctagttaacggtggagggcagtgtagtctgagcagtactcgttgctgccgcgcgcgccaccagacataatagctgacagactaacagactgttcctttccatgggtcttttctgcagtcaccgtcctcgacacgtgtgatcagatatcgcggccgctctagacaccatgggatggtcttgtattattctgtttctggtcgcaaccgccacaggggtccactctcaggtgcagctggtccagtccggggctcaggtgaagaaaccaggcgactcagtgaaggtcagctgcaaagcttccgggtacgagttcatcaactgtcccattaattgggtccggctggcaccaggacagagacctgaatggatgggatggatgaagccacgatttggagccgtgtcttatgctaggcagctgcagggccgcgtcaccatgacacgagatatgtacagctccaccgcctatctggagctgcggagactgacaagcgacgatactgcagtgtactattgcgccaggggcaaatactgtacagctcgcgactactataactgggattttgaacactggggacagggcactctggtgaccgtctctagtccgtcgaccaagggcccatcggtcttccccctggcaccctcctccaagagcacctctgggggcacagcggccctgggctgcctggtcaaggactacttccccgaacccgtgacggtgtcgtggaactcaggcgccctgaccagcggcgtgcacaccttcccggctgtcctacagtcctcaggactctactccctcagcagcgtggtgaccgtgccctccagcagcttgggcacccagacctacatctgcaacgtgaatcacaagcccagcaacaccaaggtggacaagaaagttgagcccaaatcttgtgacaaaactcacacatgcccaccgtgcccagcacctgaactcctggggggaccgtcagtcttcctcttccccccaaaacccaaggacaccctcatgatctcccggacccctgaggtcacatgcgtggtggtggacgtgagccacgaagaccctgaggtcaagttcaactggtacgtggacggcgtggaggtgcataatgccaagacaaagccgcgggaggagcagtacaacagcacgtaccgtgtggtcagcgtcctcaccgtcctgcaccaggactggctgaatggcaaggagtacaagtgcaaggtctccaacaaagccctcccagcccccatcgagaaaaccatctccaaagccaaagggcagccccgagaaccacaggtgtacaccctgcccccatcccgggatgagctgaccaagaaccaggtcagcctgacctgcctggtcaaaggcttctatcccagcgacatcgccgtggagtgggagagcaatgggcagccggagaacaactacaagaccacgcctcccgtgctggactccgacggctccttcttcctctacagcaagctcaccgtggacaagagcaggtggcagcaggggaacgtcttctcatgctccgtgatgcatgaggctctgcacaaccactacacgcagaagagcctctccctgtctccgggtaaatgatgaggatccagatctgctgtgccttctagttgccagccatctgttgtttgcccctcccccgtgccttccttgaccctggaaggtgccactcccactgtcctttcctaataaaatgaggaaattgcatcgcattgtctgagtaggtgtcattctattctggggggtggggtggggcaggacagcaagggggaggattgggaagacaatagcaggcatgctggggatgcggtgggctctatgggtacccaggtgctgaagaattgacccggttcctcctgggccagaaagaagcaggcacatccccttctctgtgacacaccctgtccacgcccctggttcttagttccagccccactcataggacactcatagctcaggagggctccgccttcaatcccacccgctaaagtacttggagcggtctctccctccctcatcagcccaccaaaccaaacctagcctccaagagtgggaagaaattaaagcaagataggctattaagtgcagagggagagaaaatgcctccaacatgtgaggaagtaatgagagaaatcatagaattttaaggccatgatttaaggccatcatggccttaatcttccgcttcctcgctcactgactcgctgcgctcggtcgttcggctgcggcgagcggtatcagctcactcaaaggcggtaatacggttatccacagaatcaggggataacgcaggaaagaacatgtgagcaaaaggccagcaaaaggccaggaaccgtaaaaaggccgcgttgctggcgtttttccataggctccgcccccctgacgagcatcacaaaaatcgacgctcaagtcagaggtggcgaaacccgacaggactataaagataccaggcgtttccccctggaagctccctcgtgcgctctcctgttccgaccctgccgcttaccggatacctgtccgcctttctcccttcgggaagcgtggcgctttctcatagctcacgctgtaggtatctcagttcggtgtaggtcgttcgctccaagctgggctgtgtgcacgaaccccccgttcagcccgaccgctgcgccttatccggtaactatcgtcttgagtccaacccggtaagacacgacttatcgccactggcagcagccactggtaacaggattagcagagcgaggtatgtaggcggtgctacagagttcttgaagtggtggcctaactacggctacactagaagaacagtatttggtatctgcgctctgctgaagccagttaccttcggaaaaagagttggtagctcttgatccggcaaacaaaccaccgctggtagcggtggtttttttgtttgcaagcagcagattacgcgcagaaaaaaaggatctcaagaagatcctttgatcttttctacggggtctgacgctcagtggaacgaaaactcacgttaagggattttggtcatgagattatcaaaaaggatcttcacctagatccttttaaattaaaaatgaagttttaaatcaatctaaagtatatatgagtaaacttggtctgacagttaccaatgcttaatcagtgaggcacctatctcagcgatctgtctatttcgttcatccatagttgcctgactcggggggggggggcgctgaggtctgcctcgtgaagaaggtgttgctgactcataccaggcctgaatcgccccatcatccagccagaaagtgagggagccacggttgatgagagctttgttgtaggtggaccagttggtgattttgaacttttgctttgccacggaacggtctgcgttgtcgggaagatgcgtgatctgatccttcaactcagcaaaagttcgatttattcaacaaagccgccgtcccgtcaagtcagcgtaatgctctgccagtgttacaaccaattaaccaattctgattagaaaaactcatcgagcatcaaatgaaactgcaatttattcatatcaggattatcaataccatatttttgaaaaagccgtttctgtaatgaaggagaaaactcaccgaggcagttccataggatggcaagatcctggtatcggtctgcgattccgactcgtccaacatcaatacaacctattaatttcccctcgtcaaaaataaggttatcaagtgagaaatcaccatgagtgacgactgaatccggtgagaatggcaaaagcttatgcatttctttccagacttgttcaacaggccagccattacgctcgtcatcaaaatcactcgcatcaaccaaaccgttattcattcgtgattgcgcctgagcgagacgaaatacgcgatcgctgttaaaaggacaattacaaacaggaatcgaatgcaaccggcgcaggaacactgccagcgcatcaacaatattttcacctgaatcaggatattcttctaatacctggaatgctgttttcccggggatcgcagtggtgagtaaccatgcatcatcaggagtacggataaaatgcttgatggtcggaagaggcataaattccgtcagccagtttagtctgaccatctcatctgtaacatcattggcaacgctacctttgccatgtttcagaaacaactctggcgcatcgggcttcccatacaatcgatagattgtcgcacctgattgcccgacattatcgcgagcccatttatacccatataaatcagcatccatgttggaatttaatcgcggcctcgagcaagacgtttcccgttgaatatggctcataacaccccttgtattactgtttatgtaagcagacagttttattgttcatgatgatatatttttatcttgtgcaatgtaacatcagagattttgagacacaacgtggctttccccccccccccattattgaagcatttatcagggttattgtctcatgagcggatacatatttgaatgtatttagaaaaataaacaaataggggttccgcgcacatttccccgaaaagtgccacctgacgtctaagaaaccattattatcatgacattaacctataaaaataggcgtatcacgaggccctttcgtc

SEQ ID NO: 191 - DNA, 1425 bp, Artificial Sequence
  Description of Artificial Sequence: Synthetic polynucleotide
atgggatggtcttgtattattctgtttctggtcgcaaccgccacaggggtccactctcaggtgcagctggtccagtccggggctcaggtgaagaaaccaggcgactcagtgaaggtcagctgcaaagcttccgggtacgagttcatcaactgtcccattaattgggtccggctggcaccaggacagagacctgaatggatgggatggatgaagccacgatggggagccgtgtcttatgctaggcagctgcagggccgcgtcaccatgacacgagatatgtacagctccaccgcctatctggagctgcggagactgacaagcgacgatactgcagtgtactattgcgccaggggcaaatactgtacagctcgcgactactataactgggattttgaacactggggacagggcactctggtgaccgtctctagtccgtcgaccaagggcccatcggtcttccccctggcaccctcctccaagagcacctctgggggcacagcggccctgggctgcctggtcaaggactacttccccgaacccgtgacggtgtcgtggaactcaggcgccctgaccagcggcgtgcacaccttcccggctgtcctacagtcctcaggactctactccctcagcagcgtggtgaccgtgccctccagcagcttgggcacccagacctacatctgcaacgtgaatcacaagcccagcaacaccaaggtggacaagaaagttgagcccaaatcttgtgacaaaactcacacatgcccaccgtgcccagcacctgaactcctggggggaccgtcagtcttcctcttccccccaaaacccaaggacaccctcatgatctcccggacccctgaggtcacatgcgtggtggtggacgtgagccacgaagaccctgaggtcaagttcaactggtacgtggacggcgtggaggtgcataatgccaagacaaagccgcgggaggagcagtacaacagcacgtaccgtgtggtcagcgtcctcaccgtcctgcaccaggactggctgaatggcaaggagtacaagtgcaaggtctccaacaaagccctcccagcccccatcgagaaaaccatctccaaagccaaagggcagccccgagaaccacaggtgtacaccctgcccccatcccgggatgagctgaccaagaaccaggtcagcctgacctgcctggtcaaaggcttctatcccagcgacatcgccgtggagtgggagagcaatgggcagccggagaacaactacaagaccacgcctcccgtgctggactccgacggctccttcttcctctacagcaagctcaccgtggacaagagcaggtggcagcaggggaacgtcttctcatgctccgtgatgcatgaggctctgcacaaccactacacgcagaagagcctctccctgtctccgggtaaatga

SEQ ID NO: 192 - DNA, 5837 bp, Artificial Sequence
  Description of Artificial Sequence: Synthetic polynucleotide
tcgcgcgtttcggtgatgacggtgaaaacctctgacacatgcagctcccggagacggtcacagcttgtctgtaagcggatgccgggagcagacaagcccgtcagggcgcgtcagcgggtgttggcgggtgtcggggctggcttaactatgcggcatcagagcagattgtactgagagtgcaccatatgcggtgtgaaataccgcacagatgcgtaaggagaaaataccgcatcagattggctattggccattgcatacgttgtatccatatcataatatgtacatttatattggctcatgtccaacattaccgccatgttgacattgattattgactagttattaatagtaatcaattacggggtcattagttcatagcccatatatggagttccgcgttacataacttacggtaaatggcccgcctggctgaccgcccaacgacccccgcccattgacgtcaataatgacgtatgttcccatagtaacgccaatagggactttccattgacgtcaatgggtggagtatttacggtaaactgcccacttggcagtacatcaagtgtatcatatgccaagtacgccccctattgacgtcaatgacggtaaatggcccgcctggcattatgcccagtacatgaccttatgggactttcctacttggcagtacatctacgtattagtcatcgctattaccatggtgatgcggttttggcagtacatcaatgggcgtggatagcggtttgactcacggggatttccaagtctccaccccattgacgtcaatgggagtttgttttggcaccaaaatcaacgggactttccaaaatgtcgtaacaactccgccccattgacgcaaatgggcggtaggcgtgtacggtgggaggtctatataagcagagctcgtttagtgaaccgtcagatcgcctggagacgccatccacgctgttttgacctccatagaagacaccgggaccgatccagcctccatcggctcgcatctctccttcacgcgcccgccgccctacctgaggccgccatccacgccggttgagtcgcgttctgccgcctcccgcctgtggtgcctcctgaactgcgtccgccgtctaggtaagtttaaagctcaggtcgagaccgggcctttgtccggcgctcccttggagcctacctagactcagccggctctccacgctttgcctgaccctgcttgctcaactctagttaacggtggagggcagtgtagtctgagcagtactcgttgctgccgcgcgcgccaccagacataatagctgacagactaacagactgttcctttccatgggtcttttctgcagtcaccgtcctcgacacgtgtgatcagatatcgcggccgctctagacaccatgggatggtcttgtattattctgtttctggtcgcaaccgccacaggggtccactctcaggtgcagctggtccagtccggggctcaggtgaagaaaccaggcgactcagtgaaggtcagctgcaaagcttccgggtacgagttcatcaactgtcccattaattgggtccggctggcaccaggacagagacctgaatggatgggatggatgaagccacgatggggagccgtgtcttatgctaggcagctgcagggccgcgtcaccatgacacgagatatgtacagctccaccgcctatctggagctgcggagactgacaagcgacgatactgcagtgtactattgcgccaggggcaaatactgtacagctcgcgactactataactgggattttgaacactggggacagggcactctggtgaccgtctctagtccgtcgaccaagggcccatcggtcttccccctggcaccctcctccaagagcacctctgggggcacagcggccctgggctgcctggtcaaggactacttccccgaacccgtgacggtgtcgtggaactcaggcgccctgaccagcggcgtgcacaccttcccggctgtcctacagtcctcaggactctactccctcagcagcgtggtgaccgtgccctccagcagcttgggcacccagacctacatctgcaacgtgaatcacaagcccagcaacaccaaggtggacaagaaagttgagcccaaatcttgtgacaaaactcacacatgcccaccgtgcccagcacctgaactcctggggggaccgtcagtcttcctcttccccccaaaacccaaggacaccctcatgatctcccggacccctgaggtcacatgcgtggtggtggacgtgagccacgaagaccctgaggtcaagttcaactggtacgtggacggcgtggaggtgcataatgccaagacaaagccgcgggaggagcagtacaacagcacgtaccgtgtggtcagcgtcctcaccgtcctgcaccaggactggctgaatggcaaggagtacaagtgcaaggtctccaacaaagccctcccagcccccatcgagaaaaccatctccaaagccaaagggcagccccgagaaccacaggtgtacaccctgcccccatcccgggatgagctgaccaagaaccaggtcagcctgacctgcctggtcaaaggcttctatcccagcgacatcgccgtggagtgggagagcaatgggcagccggagaacaactacaagaccacgcctcccgtgctggactccgacggctccttcttcctctacagcaagctcaccgtggacaagagcaggtggcagcaggggaacgtcttctcatgctccgtgatgcatgaggctctgcacaaccactacacgcagaagagcctctccctgtctccgggtaaatgatgaggatccagatctgctgtgccttctagttgccagccatctgttgtttgcccctcccccgtgccttccttgaccctggaaggtgccactcccactgtcctttcctaataaaatgaggaaattgcatcgcattgtctgagtaggtgtcattctattctggggggtggggtggggcaggacagcaagggggaggattgggaagacaatagcaggcatgctggggatgcggtgggctctatgggtacccaggtgctgaagaattgacccggttcctcctgggccagaaagaagcaggcacatccccttctctgtgacacaccctgtccacgcccctggttcttagttccagccccactcataggacactcatagctcaggagggctccgccttcaatcccacccgctaaagtacttggagcggtctctccctccctcatcagcccaccaaaccaaacctagcctccaagagtgggaagaaattaaagcaagataggctattaagtgcagagggagagaaaatgcctccaacatgtgaggaagtaatgagagaaatcatagaattttaaggccatgatttaaggccatcatggccttaatcttccgcttcctcgctcactgactcgctgcgctcggtcgttcggctgcggcgagcggtatcagctcactcaaaggcggtaatacggttatccacagaatcaggggataacgcaggaaagaacatgtgagcaaaaggccagcaaaaggccaggaaccgtaaaaaggccgcgttgctggcgtttttccataggctccgcccccctgacgagcatcacaaaaatcgacgctcaagtcagaggtggcgaaacccgacaggactataaagataccaggcgtttccccctggaagctccctcgtgcgctctcctgttccgaccctgccgcttaccggatacctgtccgcctttctcccttcgggaagcgtggcgctttctcatagctcacgctgtaggtatctcagttcggtgtaggtcgttcgctccaagctgggctgtgtgcacgaaccccccgttcagcccgaccgctgcgccttatccggtaactatcgtcttgagtccaacccggtaagacacgacttatcgccactggcagcagccactggtaacaggattagcagagcgaggtatgtaggcggtgctacagagttcttgaagtggtggcctaactacggctacactagaagaacagtatttggtatctgcgctctgctgaagccagttaccttcggaaaaagagttggtagctcttgatccggcaaacaaaccaccgctggtagcggtggtttttttgtttgcaagcagcagattacgcgcagaaaaaaaggatctcaagaagatcctttgatcttttctacggggtctgacgctcagtggaacgaaaactcacgttaagggattttggtcatgagattatcaaaaaggatcttcacctagatccttttaaattaaaaatgaagttttaaatcaatctaaagtatatatgagtaaacttggtctgacagttaccaatgcttaatcagtgaggcacctatctcagcgatctgtctatttcgttcatccatagttgcctgactcggggggggggggcgctgaggtctgcctcgtgaagaaggtgttgctgactcataccaggcctgaatcgccccatcatccagccagaaagtgagggagccacggttgatgagagctttgttgtaggtggaccagttggtgattttgaacttttgctttgccacggaacggtctgcgttgtcgggaagatgcgtgatctgatccttcaactcagcaaaagttcgatttattcaacaaagccgccgtcccgtcaagtcagcgtaatgctctgccagtgttacaaccaattaaccaattctgattagaaaaactcatcgagcatcaaatgaaactgcaatttattcatatcaggattatcaataccatatttttgaaaaagccgtttctgtaatgaaggagaaaactcaccgaggcagttccataggatggcaagatcctggtatcggtctgcgattccgactcgtccaacatcaatacaacctattaatttcccctcgtcaaaaataaggttatcaagtgagaaatcaccatgagtgacgactgaatccggtgagaatggcaaaagcttatgcatttctttccagacttgttcaacaggccagccattacgctcgtcatcaaaatcactcgcatcaaccaaaccgttattcattcgtgattgcgcctgagcgagacgaaatacgcgatcgctgttaaaaggacaattacaaacaggaatcgaatgcaaccggcgcaggaacactgccagcgcatcaacaatattttcacctgaatcaggatattcttctaatacctggaatgctgttttcccggggatcgcagtggtgagtaaccatgcatcatcaggagtacggataaaatgcttgatggtcggaagaggcataaattccgtcagccagtttagtctgaccatctcatctgtaacatcattggcaacgctacctttgccatgtttcagaaacaactctggcgcatcgggcttcccatacaatcgatagattgtcgcacctgattgcccgacattatcgcgagcccatttatacccatataaatcagcatccatgttggaatttaatcgcggcctcgagcaagacgtttcccgttgaatatggctcataacaccccttgtattactgtttatgtaagcagacagttttattgttcatgatgatatatttttatcttgtgcaatgtaacatcagagattttgagacacaacgtggctttccccccccccccattattgaagcatttatcagggttattgtctcatgagcggatacatatttgaatgtatttagaaaaataaacaaataggggttccgcgcacatttccccgaaaagtgccacctgacgtctaagaaaccattattatcatgacattaacctataaaaataggcgtatcacgaggccctttcgtc

SEQ ID NO: 193 - DNA, 1425 bp, Artificial Sequence
  Description of Artificial Sequence: Synthetic polynucleotide
atgggatggtcttgtattattctgtttctggtcgcaaccgccacaggggtccactctcaggtgcagctggtccagtccggggctcaggtgaagaaaccaggcgactcagtgaaggtcagctgcaaagcttccgggtacgagttcatcaactgtcccattaattgggtccggctggcaccaggacagagacctgaatggatgggatggatgaagccacgatatggagccgtgtcttatgctaggcagctgcagggccgcgtcaccatgacacgagatatgtacagctccaccgcctatctggagctgcggagactgacaagcgacgatactgcagtgtactattgcgccaggggcaaatactgtacagctcgcgactactataactgggattttgaacactggggacagggcactctggtgaccgtctctagtccgtcgaccaagggcccatcggtcttccccctggcaccctcctccaagagcacctctgggggcacagcggccctgggctgcctggtcaaggactacttccccgaacccgtgacggtgtcgtggaactcaggcgccctgaccagcggcgtgcacaccttcccggctgtcctacagtcctcaggactctactccctcagcagcgtggtgaccgtgccctccagcagcttgggcacccagacctacatctgcaacgtgaatcacaagcccagcaacaccaaggtggacaagaaagttgagcccaaatcttgtgacaaaactcacacatgcccaccgtgcccagcacctgaactcctggggggaccgtcagtcttcctcttccccccaaaacccaaggacaccctcatgatctcccggacccctgaggtcacatgcgtggtggtggacgtgagccacgaagaccctgaggtcaagttcaactggtacgtggacggcgtggaggtgcataatgccaagacaaagccgcgggaggagcagtacaacagcacgtaccgtgtggtcagcgtcctcaccgtcctgcaccaggactggctgaatggcaaggagtacaagtgcaaggtctccaacaaagccctcccagcccccatcgagaaaaccatctccaaagccaaagggcagccccgagaaccacaggtgtacaccctgcccccatcccgggatgagctgaccaagaaccaggtcagcctgacctgcctggtcaaaggcttctatcccagcgacatcgccgtggagtgggagagcaatgggcagccggagaacaactacaagaccacgcctcccgtgctggactccgacggctccttcttcctctacagcaagctcaccgtggacaagagcaggtggcagcaggggaacgtcttctcatgctccgtgatgcatgaggctctgcacaaccactacacgcagaagagcctctccctgtctccgggtaaatga

SEQ ID NO: 194 - DNA, 5837 bp, Artificial Sequence
  Description of Artificial Sequence: Synthetic polynucleotide
tcgcgcgtttcggtgatgacggtgaaaacctctgacacatgcagctcccggagacggtcacagcttgtctgtaagcggatgccgggagcagacaagcccgtcagggcgcgtcagcgggtgttggcgggtgtcggggctggcttaactatgcggcatcagagcagattgtactgagagtgcaccatatgcggtgtgaaataccgcacagatgcgtaaggagaaaataccgcatcagattggctattggccattgcatacgttgtatccatatcataatatgtacatttatattggctcatgtccaacattaccgccatgttgacattgattattgactagttattaatagtaatcaattacggggtcattagttcatagcccatatatggagttccgcgttacataacttacggtaaatggcccgcctggctgaccgcccaacgacccccgcccattgacgtcaataatgacgtatgttcccatagtaacgccaatagggactttccattgacgtcaatgggtggagtatttacggtaaactgcccacttggcagtacatcaagtgtatcatatgccaagtacgccccctattgacgtcaatgacggtaaatggcccgcctggcattatgcccagtacatgaccttatgggactttcctacttggcagtacatctacgtattagtcatcgctattaccatggtgatgcggttttggcagtacatcaatgggcgtggatagcggtttgactcacggggatttccaagtctccaccccattgacgtcaatgggagtttgttttggcaccaaaatcaacgggactttccaaaatgtcgtaacaactccgccccattgacgcaaatgggcggtaggcgtgtacggtgggaggtctatataagcagagctcgtttagtgaaccgtcagatcgcctggagacgccatccacgctgttttgacctccatagaagacaccgggaccgatccagcctccatcggctcgcatctctccttcacgcgcccgccgccctacctgaggccgccatccacgccggttgagtcgcgttctgccgcctcccgcctgtggtgcctcctgaactgcgtccgccgtctaggtaagtttaaagctcaggtcgagaccgggcctttgtccggcgctcccttggagcctacctagactcagccggctctccacgctttgcctgaccctgcttgctcaactctagttaacggtggagggcagtgtagtctgagcagtactcgttgctgccgcgcgcgccaccagacataatagctgacagactaacagactgttcctttccatgggtcttttctgcagtcaccgtcctcgacacgtgtgatcagatatcgcggccgctctagacaccatgggatggtcttgtattattctgtttctggtcgcaaccgccacaggggtccactctcaggtgcagctggtccagtccggggctcaggtgaagaaaccaggcgactcagtgaaggtcagctgcaaagcttccgggtacgagttcatcaactgtcccattaattgggtccggctggcaccaggacagagacctgaatggatgggatggatgaagccacgatatggagccgtgtcttatgctaggcagctgcagggccgcgtcaccatgacacgagatatgtacagctccaccgcctatctggagctgcggagactgacaagcgacgatactgcagtgtactattgcgccaggggcaaatactgtacagctcgcgactactataactgggattttgaacactggggacagggcactctggtgaccgtctctagtccgtcgaccaagggcccatcggtcttccccctggcaccctcctccaagagcacctctgggggcacagcggccctgggctgcctggtcaaggactacttccccgaacccgtgacggtgtcgtggaactcaggcgccctgaccagcggcgtgcacaccttcccggctgtcctacagtcctcaggactctactccctcagcagcgtggtgaccgtgccctccagcagcttgggcacccagacctacatctgcaacgtgaatcacaagcccagcaacaccaaggtggacaagaaagttgagcccaaatcttgtgacaaaactcacacatgcccaccgtgcccagcacctgaactcctggggggaccgtcagtcttcctcttccccccaaaacccaaggacaccctcatgatctcccggacccctgaggtcacatgcgtggtggtggacgtgagccacgaagaccctgaggtcaagttcaactggtacgtggacggcgtggaggtgcataatgccaagacaaagccgcgggaggagcagtacaacagcacgtaccgtgtggtcagcgtcctcaccgtcctgcaccaggactggctgaatggcaaggagtacaagtgcaaggtctccaacaaagccctcccagcccccatcgagaaaaccatctccaaagccaaagggcagccccgagaaccacaggtgtacaccctgcccccatcccgggatgagctgaccaagaaccaggtcagcctgacctgcctggtcaaaggcttctatcccagcgacatcgccgtggagtgggagagcaatgggcagccggagaacaactacaagaccacgcctcccgtgctggactccgacggctccttcttcctctacagcaagctcaccgtggacaagagcaggtggcagcaggggaacgtcttctcatgctccgtgatgcatgaggctctgcacaaccactacacgcagaagagcctctccctgtctccgggtaaatgatgaggatccagatctgctgtgccttctagttgccagccatctgttgtttgcccctcccccgtgccttccttgaccctggaaggtgccactcccactgtcctttcctaataaaatgaggaaattgcatcgcattgtctgagtaggtgtcattctattctggggggtggggtggggcaggacagcaagggggaggattgggaagacaatagcaggcatgctggggatgcggtgggctctatgggtacccaggtgctgaagaattgacccggttcctcctgggccagaaagaagcaggcacatccccttctctgtgacacaccctgtccacgcccctggttcttagttccagccccactcataggacactcatagctcaggagggctccgccttcaatcccacccgctaaagtacttggagcggtctctccctccctcatcagcccaccaaaccaaacctagcctccaagagtgggaagaaattaaagcaagataggctattaagtgcagagggagagaaaatgcctccaacatgtgaggaagtaatgagagaaatcatagaattttaaggccatgatttaaggccatcatggccttaatcttccgcttcctcgctcactgactcgctgcgctcggtcgttcggctgcggcgagcggtatcagctcactcaaaggcggtaatacggttatccacagaatcaggggataacgcaggaaagaacatgtgagcaaaaggccagcaaaaggccaggaaccgtaaaaaggccgcgttgctggcgtttttccataggctccgcccccctgacgagcatcacaaaaatcgacgctcaagtcagaggtggcgaaacccgacaggactataaagataccaggcgtttccccctggaagctccctcgtgcgctctcctgttccgaccctgccgcttaccggatacctgtccgcctttctcccttcgggaagcgtggcgctttctcatagctcacgctgtaggtatctcagttcggtgtaggtcgttcgctccaagctgggctgtgtgcacgaaccccccgttcagcccgaccgctgcgccttatccggtaactatcgtcttgagtccaacccggtaagacacgacttatcgccactggcagcagccactggtaacaggattagcagagcgaggtatgtaggcggtgctacagagttcttgaagtggtggcctaactacggctacactagaagaacagtatttggtatctgcgctctgctgaagccagttaccttcggaaaaagagttggtagctcttgatccggcaaacaaaccaccgctggtagcggtggtttttttgtttgcaagcagcagattacgcgcagaaaaaaaggatctcaagaagatcctttgatcttttctacggggtctgacgctcagtggaacgaaaactcacgttaagggattttggtcatgagattatcaaaaaggatcttcacctagatccttttaaattaaaaatgaagttttaaatcaatctaaagtatatatgagtaaacttggtctgacagttaccaatgcttaatcagtgaggcacctatctcagcgatctgtctatttcgttcatccatagttgcctgactcggggggggggggcgctgaggtctgcctcgtgaagaaggtgttgctgactcataccaggcctgaatcgccccatcatccagccagaaagtgagggagccacggttgatgagagctttgttgtaggtggaccagttggtgattttgaacttttgctttgccacggaacggtctgcgttgtcgggaagatgcgtgatctgatccttcaactcagcaaaagttcgatttattcaacaaagccgccgtcccgtcaagtcagcgtaatgctctgccagtgttacaaccaattaaccaattctgattagaaaaactcatcgagcatcaaatgaaactgcaatttattcatatcaggattatcaataccatatttttgaaaaagccgtttctgtaatgaaggagaaaactcaccgaggcagttccataggatggcaagatcctggtatcggtctgcgattccgactcgtccaacatcaatacaacctattaatttcccctcgtcaaaaataaggttatcaagtgagaaatcaccatgagtgacgactgaatccggtgagaatggcaaaagcttatgcatttctttccagacttgttcaacaggccagccattacgctcgtcatcaaaatcactcgcatcaaccaaaccgttattcattcgtgattgcgcctgagcgagacgaaatacgcgatcgctgttaaaaggacaattacaaacaggaatcgaatgcaaccggcgcaggaacactgccagcgcatcaacaatattttcacctgaatcaggatattcttctaatacctggaatgctgttttcccggggatcgcagtggtgagtaaccatgcatcatcaggagtacggataaaatgcttgatggtcggaagaggcataaattccgtcagccagtttagtctgaccatctcatctgtaacatcattggcaacgctacctttgccatgtttcagaaacaactctggcgcatcgggcttcccatacaatcgatagattgtcgcacctgattgcccgacattatcgcgagcccatttatacccatataaatcagcatccatgttggaatttaatcgcggcctcgagcaagacgtttcccgttgaatatggctcataacaccccttgtattactgtttatgtaagcagacagttttattgttcatgatgatatatttttatcttgtgcaatgtaacatcagagattttgagacacaacgtggctttccccccccccccattattgaagcatttatcagggttattgtctcatgagcggatacatatttgaatgtatttagaaaaataaacaaataggggttccgcgcacatttccccgaaaagtgccacctgacgtctaagaaaccattattatcatgacattaacctataaaaataggcgtatcacgaggccctttcgtc

SEQ ID NO: 195 - protein, 98 aa, Homo sapiens
QVQLVQSGAEVKKPGASVKVSCKASGYTFTGYYMHWVRQAPGQGLEWMGWINPNSGGTNYAQKFQGRVTMTRDTSISTAYMELSRLRSDDTAVYYCAR

SEQ ID NO: 196 - protein, 125 aa, Homo sapiens
QVRLSQSGGQMKKPGESMRLSCRASGYEFLNCPINWIRLAPGRRPEWMGWLKPRGGAVNYARKFQGRVTMTRDVYSDTAFLELRSLTSDDTAVYFCTRGKYCTARDYYNWDFEHWGRGAPVTVSS

SEQ ID NO: 197 - protein, 121 aa, Homo sapiens
QVQLVQSGGQMKKPGESMRISCQASGYEFIDCTLNWVRLAPGRRPEWMGWLKPRGGAVNYARPLQGRVTMTRDVYSDTAFLELRSLTADDTAVYYCTRGKNCDYNWDFEHWGRGTPVTVSS

SEQ ID NO: 198 - protein, 121 aa, Homo sapiens
QVQLVQSGAEVKKPGASVKVSCKASGYTFTGYYMHWVRQAPGQGLEWMGWINPNSGGTNYAQKFQGRVTMTRDTSISTAYMELSRLRSDDTAVYYCARGKNCDYNWDFEHWGRGTPVIVSS

SEQ ID NO: 199 - protein, 144 aa, Homo sapiens
MGWSCIILFLVATATGVHSQVQLVQSGAEVKKPGASVKVSCKASGYEFIDCTLNWVRQAPGQRPEWMGWLKPRGGAVNYARPLQGRVTMTRDVYSSTAYMELRRLRSDDTAVYYCARGKYCTARDYYNWDFEHWGQGTLVTVSS

SEQ ID NO: 200 - protein, 144 aa, Homo sapiens
MGWSCIILFLVATATGVHSQVQLVQSGAEVKKPGASVKVSCKASGYEFLNCPINWVRQAPGQGLEWMGWLKPRGGAVNYARKFQGRVTMTRDVYISTAYMELSRLRSDDTAVYYCARGKYCTARDYYNWDFEHWGQGTLVTVSS

SEQ ID NO: 201 - protein, 125 aa, Homo sapiens
QVQLVQSGAEVKKPGASVKVSCKASGYEFLNCPINWVRQAPGQRPEWMGWLKPRGGAVNYARKFQGRVTMTRDVYSSTAYMELRRLRSDDTAVYYCARGKYCTARDYYNWDFEHWGQGTLVTVSS

SEQ ID NO: 202 - protein, 125 aa, Homo sapiens
QVQLVQSGAEVKKPGASVKVSCKASGYTFTGYYMHWVRQAPGQGLEWMGWINPNSGGTNYAQKFQGRVTMTRDTSISTAYMELSRLRSDDTAVYYCARGKYCTARDYYNWDFEHWGQGTPVTVSS

SEQ ID NO: 203 - protein, 125 aa, Homo sapiens
QVQLVQSGAEVKKPGASVKVSCKASGYEFINCPINWVRQAPGQGLEWMGWMKPRGGAVSYARQLQGRVTMTRDMYISTAYMELSRLRSDDTAVYYCARGKYCTARDYYNWDFEHWGQGTLVTVSS

SEQ ID NO: 204 - protein, 125 aa, Homo sapiens
QVQLVQSGAEVKKPGASVKVSCKASGYEFINCPINWVRQAPGQRPEWMGWMKPRGGAVSYARQLQGRVTMTRDMYSSTAYMELRRLRSDDTAVYYCARGKYCTARDYYNWDFEHWGQGTLVTVSS

SEQ ID NO: 205 - protein, 125 aa, Homo sapiens
QVQLVQSGAQVKKPGASVKVSCKASGYEFINCPINWVRQAPGQRPEWMGWMKPRGGAVSYARQLQGRVTMTRDMYSSTAYLELRRLTSDDTAVYYCARGKYCTARDYYNWDFEHWGQGTLVTVSS

SEQ ID NO: 206 - protein, 125 aa, Homo sapiens
QVQLVQSGAQVKKPGDSVKVSCKASGYEFINCPINWVRLAPGQRPEWMGWMKPRGGAVSYARQLQGRVTMTRDMYSSTAYLELRRLTSDDTAVYYCARGKYCTARDYYNWDFEHWGQGTLVTVSS

SEQ ID NO: 207 - protein, 125 aa, Homo sapiens
QVQLMQSGGQMKKPGDSVKVSCKASGYEFINCPINWVRLAPGQRPEWMGWMKPRGGAVSYARQLQGRVTMTRDMYSSTAYLELRRLTSDDTAVYYCARGKYCTARDYYNWDFEHWGQGTLVTVSS

SEQ ID NO: 208 - protein, 105 aa, Homo sapiens
EIVLTQSPATLSLSPGERATLSCRASQSVSSYLAWYQQKPGQAPRLLIYDASNRATGIPARFSGSGSGTDFTLTISSLEPEDFAVYYCQQYEFFGQGTKVQVDIK

SEQ ID NO: 209 - protein, 102 aa, Homo sapiens
EIVLTQSPATLSLSPGERATLSCRTSQYGSLAWYQQKPGQAPRLVIYSGSTRAAGIPARFSGSSGPDYTLTISSLEPEDFAVYYCQQYEFFGPGTKVQVDIK

SEQ ID NO: 210 - protein, 103 aa, Homo sapiens
EIVLTQSPATLSLSPGERATLSCRTSQYGSLAWYQQKPGQAPRLVIYSGSTRAAGIPARFSGSRSGPDYTLTISSLESGDFAVYYCQQYEFFGPGTKVQVDIK

SEQ ID NO: 211 - protein, 103 aa, Homo sapiens
EIVLTQSPATLSLSPGERATISCRTSQYGSLAWYQQKPGQAPRLVIYSGSTRAAGIPARFSGSRSGPDYTLTISSLESGDFGVYYCQQYEFFGPGTKVQVDIK

SEQ ID NO: 212 - protein, 103 aa, Homo sapiens
EIVLTQSPGTLSLSPGETAIISCRTSQYGSLAWYQQRPGQAPRLVIYSGSTRAAGIPDRFSGSRWGPDYTLTISNLESGDFGVYYCQQYEFFGQGTKVQVDIK

SEQ ID NO: 213 - protein, 103 aa, Homo sapiens; identical to SEQ ID NO: 51

SEQ ID NO: 214 - protein, 103 aa, Homo sapiens
EIVLTQSPATLSLSPGERATLSCRTSQSGSLAWYQQKPGQAPRLVIYSGSTRAAGIPARFSGSRSGADYTLTISSLESGDFAVYYCQQYEFFGPGTKVQVDIK

SEQ ID NO: 215 - protein, 103 aa, Homo sapiens
EIVLTQSPATLSLSPGETAIISCRTSQSGSLAWYQQRPGQAPRLVIYSGSTRAAGIPDRFSGSRWGADYNLSISNLESGDFGVYYCQQYEFFGQGTKVQVDIK

SEQ ID NO: 216 - protein, 125 aa, Homo sapiens
QVQLSQSGGQMKKPGDSMRVSCKASGYEFINCPINWVRLAPGQRPEWMGWMKPRGGAVSYARQLQGRVTMTRDMYSSTAYLELRRLTSDDTAVYYCARGKYCTARDYYNWDFEHWGQGTPVTVSS

SEQ ID NO: 217 - protein, 125 aa, Homo sapiens
QVQLSQSGGQMKKPGDSMRISCKASGYEFINCPINWVRLAPGQRPEWMGWMKPRGGAVSYARQLQGRVTMTRDMYSSTAYLELRSLTSDDTAVYYCARGKYCTARDYYNWDFEHWGQGTPVTVSS

SEQ ID NO: 218 - protein, 125 aa, Homo sapiens; identical to SEQ ID NO: 39

SEQ ID NO: 219 - protein, 101 aa, Homo sapiens
ELTQSPGTLSLSPGETAIISCRTSQYGSLAWYQQRPGQAPRLVIYSGSTRAAGIPDRFSGSRWGPDYNLTISNLESGDFGVYYCQQYEFFGQGTKVQVDIK

SEQ ID NO: 220 - protein, 101 aa, Homo sapiens
KLTQSPGTLSLSPGETAIISCRTSQYGSLAWYQQRPGQAPRLVIYSGSTRAAGIPDRFSGSRWGPDYNLTISNLESGDFGVYYCQQYEFFGQGTKVQVDIK

SEQ ID NO: 221 - protein, 101 aa, Homo sapiens
SLTQSPGTLSLSPGETAIISCRTSQYGSLAWYQQRPGQAPRLVIYSGSTRAAGIPDRFSGSRWGPDYNLTISNLESGDFGVYYCQQYEFFGQGTKVQVDIK

SEQ ID NO: 222 - protein, 101 aa, Homo sapiens
VLTQSPGTLSLSPGETAIISCRTSQYGSLAWYQQRPGQAPRLVIYSGSTRAAGIPDRFSGSRWGPDYNLTISNLESGDFGVYYCQQYEDFGQGTKVQVDIK

SEQ ID NO: 223 - protein, 101 aa, Homo sapiens
VLTQSPGTLSLSPGETAIISCRTSQYGSLAWYQQRPGQAPRLVIYSGSTRAAGIPDRFSGSRWGPDYNLTISNLESGDFGVYYCQQYEKFGQGTKVQVDIK

SEQ ID NO: 224 - protein, 101 aa, Homo sapiens
VLTQSPGTLSLSPGETAIISCRTSQYGSLAWYQQRPGQAPRLVIYSGSTRAAGIPDRFSGSRWGPDYNLTISNLESGDFGVYYCQQYESFGQGTKVQVDIK

SEQ ID NO: 225 - protein, 101 aa, Homo sapiens
VLTQSPGTLSLSPGETAIISCRTSQYGSLAWYQQRPGQAPRLVIYSGSTRAAGIPDRFSGSRWGPDYNLTISNLESGDFGVYYCQQYEHFGQGTKVQVDIK

SEQ ID NO: 226 - protein, 101 aa, Homo sapiens
ELTQSPGTLSLSPGETAIISCRTSQYGSLAWYQQRPGQAPRLVIYSGSTRAAGIPDRFSGSRWGPDYNLTISNLESGDFGVYYCQQYESFGQGTKVQVDIK

SEQ ID NO: 227 - protein, 101 aa, Homo sapiens
ELTQSPGTLSLSPGETAIISCRTSQYGSLAWYQQRPGQAPRLVIYSGSTRAAGIPDRFSGSRWGPDYNLTISNLESGDFGVYYCQQYEHFGQGTKVQVDIK

SEQ ID NO: 228 - protein, 103 aa, Homo sapiens
EIVLTQSPGTLSLSPGETAIISCRTSQYGSLAWYQQRPGQAPRLVIYSGSTRAAGIPDRFSGSRSGPDYTLTISNLESGDFGVYYCQQYEFFGQGTKVQVDIK

SEQ ID NO: 229 - protein, 103 aa, Homo sapiens
EIVLTQSPGTLSLSPGETAQISCRTSQYGSLAWYQQRPGQAPRLVIYSGSTRAAGIPDRFSGSRNGPDYTLTISNLESGDFGVYYCQQYEFFGQGTKVQVDIK

SEQ ID NO: 230 - protein, 103 aa, Homo sapiens
EIVLTQSPGTLSLSPGETAQISCRTSQYGSLAWYQQRPGQAPRLVIYSGSTRAAGIPDRFSGSRNGPDYTLTISNLESGDFGVYYCQQYEFFGQGTKVQQDNK

SEQ ID NO: 231 - protein, 103 aa, Homo sapiens
EIVLTQSPGTLSLSPGETAEISCRTSQYGSLAWYQQRPGQAPRLVIYSGSTRAAGIPDRFKGEREGPEYRLRISNLESGDFGVYYCQQYEFFGQGTKVQQDNK

SEQ ID NO: 232 - protein, 101 aa, Homo sapiens
SLTQSPGTLSLSPGETATISCRTSQYGSLAWYQQRPGQAPRLVIYSGSTRAAGIPDRFSGSRSGPDYTLTISNLESGDFGVYYCQQYEFFGQGTKVQQDNK

SEQ ID NO: 233 - protein, 101 aa, Homo sapiens
SLTQSPGTLSLSPGETAIISCRTSQYGSLAWYQQRPGQAPRLVIYSGSTRAAGIPDRFSGSRSGPDYTLTISNLESGDFGVYYCQQYEFFGQGTKVQVDIK

SEQ ID NO: 234 - protein, 101 aa, Homo sapiens
SLTQSPGTLSLSPGETAQISCRTSQYGSLAWYQQRPGQAPRLVIYSGSTRAAGIPDRFSGSRNGPDYTLTISNLESGDFGVYYCQQYEFFGQGTKVQVDIK

SEQ ID NO: 235 - protein, 101 aa, Homo sapiens
SLTQSPGTLSLSPGETAQISCRTSQYGSLAWYQQRPGQAPRLVIYSGSTRAAGIPDRFSGSRNGPDYTLTISNLESGDFGVYYCQQYEFFGQGTKVQQDNK

SEQ ID NO: 236 - protein, 101 aa, Homo sapiens
SLTQSPGTLSLSPGETAEISCRTSQYGSLAWYQQRPGQAPRLVIYSGSTRAAGIPDRFKGEREGPEYRLRISNLESGDFGVYYCQQYEFFGQGTKVQQDNK

SEQ ID NO: 237 - protein, 101 aa, Homo sapiens
ELTQSPGTLSLSPGETAQISCRTSQYGSLAWYQQRPGQAPRLVIYSGSTRAAGIPDRFSGSRNGPDYTLTISNLESGDFGVYYCQQYEFFGQGTKVQVDIK

SEQ ID NO: 238 - protein, 103 aa, Artificial sequence
  Consensus sequence
  MISC_FEATURE (1)..(1): E or no amino acid
  MISC_FEATURE (2)..(2): I or no amino acid
  MISC_FEATURE (3)..(3): V, E, K, or S
  MISC_FEATURE (20)..(20): I, Q, E, or T
  MISC_FEATURE (61)..(61): S or K
  MISC_FEATURE (63)..(63): S or E
  MISC_FEATURE (65)..(65): W, S, N, or E
  MISC_FEATURE (68)..(68): D or E
  misc_feature (70)..(70): Xaa can be any naturally occurring amino acid
  MISC_FEATURE (71)..(71): N, T, or R
  MISC_FEATURE (72)..(72): T or R
  MISC_FEATURE (91)..(91): F, D, K, S, or H
  MISC_FEATURE (100)..(100): V or Q
  MISC_FEATURE (102)..(102): I or N
XXXLTQSPGTLSLSPGETAXISCRTSQYGSLAWYQQRPGQAPRLVIYSGSTRAAGIPDRFXGXRXGPXYXLXISNLESGDFGVYYCQQYEXFGQGTKVQXDXK

SEQ ID NO: 239 - protein, 210 aa, Homo sapiens
EIELTQSPGTLSLSPGETAIISCRTSQYGSLAWYQQRPGQAPRLVIYSGSTRAAGIPDRFSGSRWGPDYNLTISNLESGDFGVYYCQQYEFFGQGTKVQVDIKRTVAAPSVFIFPPSDEQLKSGTASVVCLLNNFYPREAKVQWKVDNALQSGNSQESVTEQDSKDSTYSLSSTLTLSKADYEKHKVYACEVTHQGLSSPVTKSFNRGEC

SEQ ID NO: 240 - protein, 210 aa, Homo sapiens
EIKLTQSPGTLSLSPGETAIISCRTSQYGSLAWYQQRPGQAPRLVIYSGSTRAAGIPDRFSGSRWGPDYNLTISNLESGDFGVYYCQQYEFFGQGTKVQVDIKRTVAAPSVFIFPPSDEQLKSGTASVVCLLNNFYPREAKVQWKVDNALQSGNSQESVTEQDSKDSTYSLSSTLTLSKADYEKHKVYACEVTHQGLSSPVTKSFNRGEC

SEQ ID NO: 241 - protein, 210 aa, Homo sapiens
EISLTQSPGTLSLSPGETAIISCRTSQYGSLAWYQQRPGQAPRLVIYSGSTRAAGIPDRFSGSRWGPDYNLTISNLESGDFGVYYCQQYEFFGQGTKVQVDIKRTVAAPSVFIFPPSDEQLKSGTASVVCLLNNFYPREAKVQWKVDNALQSGNSQESVTEQDSKDSTYSLSSTLTLSKADYEKHKVYACEVTHQGLSSPVTKSFNRGEC

SEQ ID NO: 242 - protein, 210 aa, Homo sapiens
EIVLTQSPGTLSLSPGETAIISCRTSQYGSLAWYQQRPGQAPRLVIYSGSTRAAGIPDRFSGSRWGPDYNLTISNLESGDFGVYYCQQYEDFGQGTKVQVDIKRTVAAPSVFIFPPSDEQLKSGTASVVCLLNNFYPREAKVQWKVDNALQSGNSQESVTEQDSKDSTYSLSSTLTLSKADYEKHKVYACEVTHQGLSSPVTKSFNRGEC

SEQ ID NO: 243 - protein, 210 aa, Homo sapiens
EIVLTQSPGTLSLSPGETAIISCRTSQYGSLAWYQQRPGQAPRLVIYSGSTRAAGIPDRFSGSRWGPDYNLTISNLESGDFGVYYCQQYEKFGQGTKVQVDIKRTVAAPSVFIFPPSDEQLKSGTASVVCLLNNFYPREAKVQWKVDNALQSGNSQESVTEQDSKDSTYSLSSTLTLSKADYEKHKVYACEVTHQGLSSPVTKSFNRGEC

SEQ ID NO: 244 - protein, 210 aa, Homo sapiens
EIVLTQSPGTLSLSPGETAIISCRTSQYGSLAWYQQRPGQAPRLVIYSGSTRAAGIPDRFSGSRWGPDYNLTISNLESGDFGVYYCQQYESFGQGTKVQVDIKRTVAAPSVFIFPPSDEQLKSGTASVVCLLNNFYPREAKVQWKVDNALQSGNSQESVTEQDSKDSTYSLSSTLTLSKADYEKHKVYACEVTHQGLSSPVTKSFNRGEC

SEQ ID NO: 245 - protein, 210 aa, Homo sapiens
EIVLTQSPGTLSLSPGETAIISCRTSQYGSLAWYQQRPGQAPRLVIYSGSTRAAGIPDRFSGSRWGPDYNLTISNLESGDFGVYYCQQYEHFGQGTKVQVDIKRTVAAPSVFIFPPSDEQLKSGTASVVCLLNNFYPREAKVQWKVDNALQSGNSQESVTEQDSKDSTYSLSSTLTLSKADYEKHKVYACEVTHQGLSSPVTKSFNRGEC

SEQ ID NO: 246 - protein, 210 aa, Homo sapiens
EIELTQSPGTLSLSPGETAIISCRTSQYGSLAWYQQRPGQAPRLVIYSGSTRAAGIPDRFSGSRWGPDYNLTISNLESGDFGVYYCQQYESFGQGTKVQVDIKRTVAAPSVFIFPPSDEQLKSGTASVVCLLNNFYPREAKVQWKVDNALQSGNSQESVTEQDSKDSTYSLSSTLTLSKADYEKHKVYACEVTHQGLSSPVTKSFNRGEC

SEQ ID NO: 247 - protein, 210 aa, Homo sapiens
EIELTQSPGTLSLSPGETAIISCRTSQYGSLAWYQQRPGQAPRLVIYSGSTRAAGIPDRFSGSRWGPDYNLTISNLESGDFGVYYCQQYEHFGQGTKVQVDIKRTVAAPSVFIFPPSDEQLKSGTASVVCLLNNFYPREAKVQWKVDNALQSGNSQESVTEQDSKDSTYSLSSTLTLSKADYEKHKVYACEVTHQGLSSPVTKSFNRGEC

SEQ ID NO: 248 - protein, 210 aa, Homo sapiens
EIVLTQSPGTLSLSPGETAIISCRTSQYGSLAWYQQRPGQAPRLVIYSGSTRAAGIPDRFSGSRSGPDYTLTISNLESGDFGVYYCQQYEFFGQGTKVQVDIKRTVAAPSVFIFPPSDEQLKSGTASVVCLLNNFYPREAKVQWKVDNALQSGNSQESVTEQDSKDSTYSLSSTLTLSKADYEKHKVYACEVTHQGLSSPVTKSFNRGEC

SEQ ID NO: 249 - protein, 210 aa, Homo sapiens
EIVLTQSPGTLSLSPGETAQISCRTSQYGSLAWYQQRPGQAPRLVIYSGSTRAAGIPDRFSGSRNGPDYTLTISNLESGDFGVYYCQQYEFFGQGTKVQVDIKRTVAAPSVFIFPPSDEQLKSGTASVVCLLNNFYPREAKVQWKVDNALQSGNSQESVTEQDSKDSTYSLSSTLTLSKADYEKHKVYACEVTHQGLSSPVTKSFNRGEC

SEQ ID NO: 250 - protein, 210 aa, Homo sapiens
EIVLTQSPGTLSLSPGETAQISCRTSQYGSLAWYQQRPGQAPRLVIYSGSTRAAGIPDRFSGSRNGPDYTLTISNLESGDFGVYYCQQYEFFGQGTKVQQDNKRTVAAPSVFIFPPSDEQLKSGTASVVCLLNNFYPREAKVQWKVDNALQSGNSQESVTEQDSKDSTYSLSSTLTLSKADYEKHKVYACEVTHQGLSSPVTKSFNRGEC

SEQ ID NO: 251 - protein, 210 aa, Homo sapiens
EIVLTQSPGTLSLSPGETAEISCRTSQYGSLAWYQQRPGQAPRLVIYSGSTRAAGIPDRFKGEREGPEYRLRISNLESGDFGVYYCQQYEFFGQGTKVQQDNKRTVAAPSVFIFPPSDEQLKSGTASVVCLLNNFYPREAKVQWKVDNALQSGNSQESVTEQDSKDSTYSLSSTLTLSKADYEKHKVYACEVTHQGLSSPVTKSFNRGEC

SEQ ID NO: 252 - protein, 208 aa, Homo sapiens
SLTQSPGTLSLSPGETATISCRTSQYGSLAWYQQRPGQAPRLVIYSGSTRAAGIPDRFSGSRSGPDYTLTISNLESGDFGVYYCQQYEFFGQGTKVQQDNKRTVAAPSVFIFPPSDEQLKSGTASVVCLLNNFYPREAKVQWKVDNALQSGNSQESVTEQDSKDSTYSLSSTLTLSKADYEKHKVYACEVTHQGLSSPVTKSFNRGEC

SEQ ID NO: 253 - protein, 208 aa, Homo sapiens
SLTQSPGTLSLSPGETAIISCRTSQYGSLAWYQQRPGQAPRLVIYSGSTRAAGIPDRFSGSRSGPDYTLTISNLESGDFGVYYCQQYEFFGQGTKVQVDIKRTVAAPSVFIFPPSDEQLKSGTASVVCLLNNFYPREAKVQWKVDNALQSGNSQESVTEQDSKDSTYSLSSTLTLSKADYEKHKVYACEVTHQGLSSPVTKSFNRGEC

SEQ ID NO: 254 - protein, 208 aa, Homo sapiens
SLTQSPGTLSLSPGETAQISCRTSQYGSLAWYQQRPGQAPRLVIYSGSTRAAGIPDRFSGSRNGPDYTLTISNLESGDFGVYYCQQYEFFGQGTKVQVDIKRTVAAPSVFIFPPSDEQLKSGTASVVCLLNNFYPREAKVQWKVDNALQSGNSQESVTEQDSKDSTYSLSSTLTLSKADYEKHKVYACEVTHQGLSSPVTKSFNRGEC

SEQ ID NO: 255 - protein, 208 aa, Homo sapiens
SLTQSPGTLSLSPGETAQISCRTSQYGSLAWYQQRPGQAPRLVIYSGSTRAAGIPDRFSGSRNGPDYTLTISNLESGDFGVYYCQQYEFFGQGTKVQQDNKRTVAAPSVFIFPPSDEQLKSGTASVVCLLNNFYPREAKVQWKVDNALQSGNSQESVTEQDSKDSTYSLSSTLTLSKADYEKHKVYACEVTHQGLSSPVTKSFNRGEC

SEQ ID NO: 256 - protein, 208 aa, Homo sapiens
SLTQSPGTLSLSPGETAEISCRTSQYGSLAWYQQRPGQAPRLVIYSGSTRAAGIPDRFKGEREGPEYRLRISNLESGDFGVYYCQQYEFFGQGTKVQQDNKRTVAAPSVFIFPPSDEQLKSGTASVVCLLNNFYPREAKVQWKVDNALQSGNSQESVTEQDSKDSTYSLSSTLTLSKADYEKHKVYACEVTHQGLSSPVTKSFNRGEC

SEQ ID NO: 257 - protein, 208 aa, Homo sapiens
ELTQSPGTLSLSPGETAQISCRTSQYGSLAWYQQRPGQAPRLVIYSGSTRAAGIPDRFSGSRNGPDYTLTISNLESGDFGVYYCQQYEFFGQGTKVQVDIKRTVAAPSVFIFPPSDEQLKSGTASVVCLLNNFYPREAKVQWKVDNALQSGNSQESVTEQDSKDSTYSLSSTLTLSKADYEKHKVYACEVTHQGLSSPVTKSFNRGEC

SEQ ID NO: 258 - protein, 125 aa, Homo sapiens
QVRLSQSGGQMKKPGDSMRISCRASGYEFINCPINWIRLAPGKRPEWMGWMKPRHGAVNYARQLQGRVTMTRDMYSETAFLELRSLTSDDTAVYFCTRGKYCTARDYYNWDFEHWGQGTPVTVSS

SEQ ID NO: 259 - protein, 125 aa, Homo sapiens
QVRLSQSGGQMKKPGDSMRISCRASGYEFINCPINWVRLAPGKRPEWMGWMKPRHGAVSYARQLQGRVTMTRDMYSETAFLELRSLTSDDTAVYFCARGKYCTARDYYNWDFEHWGQGTPVTVSS

SEQ ID NO: 260 - protein, 125 aa, Homo sapiens
QVRLSQSGGQMKKPGDSMRISCRASGYEFINCPINWVRLAPGKRPEWMGWMKPRHGAVNYARQLQGRVTMTRDMYSETAFLELRSLTSDDTAVYFCARGKYCTARDYYNWDFEHWGQGTPVTVSS

1. An isolated monoclonal antibody or antigen binding fragment thereof, comprising a heavy chain variable domain and a light chain variable domain, wherein the heavy chain variable domain of the antibody comprises amino acids 26-33 (CDR1), 51-58 (CDR2) and 97-114 (CDR3) of SEQ ID NO: 40, and the light chain variable domain of the antibody comprises amino acids 27-30 (CDR1), 48-50 (CDR2) and 87-91 (CDR3) of SEQ ID NO: 238, wherein the antibody or antigen binding fragment specifically binds gp120 of HIV-1, and wherein the antibody is neutralizing.

2. The isolated monoclonal antibody or antigen binding fragment, of claim 1, wherein the heavy chain variable domain comprises one of:
(a) amino acids 26-33 (CDR1), 51-58 (CDR2) and 97-114 (CDR3) of SEQ ID NO: 40, wherein X₂ is G; or
(b) amino acids 26-33 (CDR1), 51-58 (CDR2) and 97-114 (CDR3) of SEQ ID NO: 40, wherein X₂ is H.

3. The isolated monoclonal antibody or antigen binding fragment of claim 1, wherein the heavy chain variable domain of the antibody comprises SEQ ID NO: 40.

4. The isolated monoclonal antibody or antigen binding fragment of claim 1, wherein the heavy chain variable domain of the antibody comprises one of:
(a) SEQ ID NO: 40, wherein X₁ is I, X₂ is G, X₃ is S and X₄ is T (VRC07; SEQ ID NO: 2);
(b) SEQ ID NO: 40, wherein X₁ is I, X₂ is H, X₃ is S and X₄ is T (VRC07 G54H; SEQ ID NO: 32);
(c) SEQ ID NO: 40, wherein X₁ is I, X₂ is H, X₃ is N and X₄ is T (VRC07 G54H, S58N; SEQ ID NO: 258);
(d) SEQ ID NO: 40, wherein X₁ is V, X₂ is H, X₃ is S and X₄ is A (VRC07 I37V, G54H, T93A; SEQ ID NO: 259); or
(e) SEQ ID NO: 40, wherein X₁ is V, X₂ is H, X₃ is N and X₄ is A (VRC07 I37V, G54H, S58N, T93A; SEQ ID NO: 260).

5. The isolated monoclonal antibody or antigen binding fragment of claim 1, wherein the light chain variable domain comprises one of:
(a) amino acids 27-30 (CDR1), 48-50 (CDR2) and 87-91 (CDR3) of SEQ ID NO: 238, wherein X₁₁ is F (VRC01 light chain CDRs);
(b) amino acids 27-30 (CDR1), 48-50 (CDR2) and 87-91 (CDR3) of SEQ ID NO: 238, wherein X₁₁ is D (VRC01 light chain CDRs with F97D);
(c) amino acids 27-30 (CDR1), 48-50 (CDR2) and 87-91 (CDR3) of SEQ ID NO: 238, wherein X₁₁ is K (VRC01 light chain CDRs with F97K)
(d) amino acids 27-30 (CDR1), 48-50 (CDR2) and 87-91 (CDR3) of SEQ ID NO: 238, wherein X₁₁ is S (VRC01 light chain CDRs with F97S); or
(e) amino acids 27-30 (CDR1), 48-50 (CDR2) and 87-91 (CDR3) of SEQ ID NO: 238, wherein X₁₁ is H (VRC01 light chain CDRs with F97H).

6. The isolated monoclonal antibody or antigen binding fragment of claim 1, wherein the light chain variable domain of the antibody comprises SEQ ID NO: 238.

7. The isolated monoclonal antibody or antigen binding fragment of claim 6, wherein the light chain variable domain of the antibody comprises one of:
(a) SEQ ID NO: 238, wherein X₁ is E; X₂ is I; X₃ is V; X₄ is I; X₅ is S; X₆ is S; X₇ is W; X₈ is D; X₉ is N; X₁₀ is T; X₁₁ is F; X₁₂ is V; X₁₃ is I (VRC01 light chain; SEQ ID NO: 9);
(b) SEQ ID NO: 238, wherein X₁ is no amino acid; X₂ is no amino acid; X₃ is E; X₄ is I; X₅ is S; X₆ is S; X₇ is W; X₈ is D; X₉ is N; X₁₀ is T; X₁₁ is F; X₁₂ is V; and X₁₃ is I (VRC01L E1/I2del-V3E; SEQ ID NO: 219);
(c) SEQ ID NO: 238, wherein X₁ is no amino acid; X₂ is no amino acid; X₃ is K; X₄ is I; X₅ is S; X₆ is S; X₇ is W; X₈ is D; X₉ is N; X₁₀ is T; X₁₁ is F; X₁₂ is V; and X₁₃ is I (VRC01L V3K light chain; SEQ ID NO: 220);
(d) SEQ ID NO: 238, wherein X₁ is no amino acid; X₂ is no amino acid; X₃ is S; X₄ is I; X₅ is S; X₆ is S; X₇ is W; X₈ is D; X₉ is N; X₁₀ is T; X₁₁ is F; X₁₂ is V; and X₁₃ is I (VRC01L E1/I2del V3S light chain; SEQ ID NO: 221);
(e) SEQ ID NO: 238, wherein X₁ is no amino acid; X₂ is no amino acid; X₃ is V; X₄ is I; X₅ is S; X₆ is S; X₇ is W; X₈ is D; X₉ is N; X₁₀ is T; X₁₁ is D; X₁₂ is V; and X₁₃ is I (VRC01L E1/I2del F97D; SEQ ID NO: 222);
(f) SEQ ID NO: 238, wherein X₁ is no amino acid; X₂ is no amino acid; X₃ is V; X₄ is I; X₅ is S; X₆ is S; X₇ is W; X₈ is D; X₉ is N; X₁₀ is T; X₁₁ is K; X₁₂ is V; and X₁₃ is I (VRC01L E1/I2del F97K; SEQ ID NO: 223);
(g) SEQ ID NO: 238, wherein X₁ is no amino acid; X₂ is no amino acid; X₃ is V; X₄ is I; X₅ is S; X₆ is S; X₇ is W; X₈ is D; X₉ is N; X₁₀ is T; X₁₁ is S; X₁₂ is V; and X₁₃ is I (VRC01L E1/I2del F97S; SEQ ID NO: 224);
(h) SEQ ID NO: 238, wherein X₁ is no amino acid; X₂ is no amino acid; X₃ is V; X₄ is I; X₅ is S; X₆ is S; X₇ is W; X₈ is D; X₉ is N; X₁₀ is T; X₁₁ is H; X₁₂ is V; and X₁₃ is I (VRC01L E1/I2del F97H; SEQ ID NO: 225);
(i) SEQ ID NO: 238, wherein X₁ is no amino acid; X₂ is no amino acid; X₃ is E; X₄ is I; X₅ is S; X₆ is S; X₇ is W; X₈ is D; X₉ is N; X₁₀ is T; X₁₁ is S; X₁₂ is V; and X₁₃ is I (VRC01L E1/I2del V3E/F97S; SEQ ID NO: 226);
(j) SEQ ID NO: 238, wherein X₁ is no amino acid; X₂ is no amino acid; X₃ is E; X₄ is I; X₅ is S; X₆ is S; X₇ is W; X₈ is D; X₉ is N; X₁₀ is T; X₁₁ is H; X₁₂ is V; and X₁₃ is I (VRC01L E1/I2del V3E/F97H; SEQ ID NO: 227);
(k) SEQ ID NO: 238, wherein X₁ is no amino acid; X₂ is no amino acid; X₃ is V; X₄ is I; X₅ is S; X₆ is S; X₇ is S; X₈ is D; X₉ is T; X₁₀ is T; X₁₁ is F; X₁₂ is V; and X₁₃ is I (VRC01hpL03; SEQ ID NO: 228);
(l) SEQ ID NO: 238, wherein X₁ is no amino acid; X₂ is no amino acid; X₃ is V; X₄ is Q; X₅ is S; X₆ is S; X₇ is N; X₈ is D; X₉ is T; X₁₀ is T; X₁₁ is F; X₁₂ is V; and X₁₃ is I (VRC01hpL04; SEQ ID NO: 229);
(m) SEQ ID NO: 238, wherein X₁ is no amino acid; X₂ is no amino acid; X₃ is V; X₄ is Q; X₅ is S; X₆ is S; X₇ is N; X₈ is D; X₉ is T; X₁₀ is T; X₁₁ is F; X₁₂ is Q; and X₁₃ is N (VRC01hpL05; SEQ ID NO: 230);
(n) SEQ ID NO: 238, wherein X₁ is no amino acid; X₂ is no amino acid; X₃ is V; X₄ is E; X₅ is K; X₆ is E; X₇ is E; X₈ is E; X₉ is R; X₁₀ is R; X₁₁ is F; X₁₂ is Q; and X₁₃ is N (VRC01hpL06; SEQ ID NO: 231);
(o) SEQ ID NO: 238, wherein X₁ is no amino acid; X₂ is no amino acid; X₃ is S; X₄ is T; X₅ is S; X₆ is S; X₇ is S; X₈ is D; X₉ is T; X₁₀ is T; X₁₁ is F; X₁₂ is Q; and X₁₃ is N (VRC01hpL02 E1/I2 deletion/V3S; SEQ ID NO: 232);
(p) SEQ ID NO: 238, wherein X₁ is no amino acid; X₂ is no amino acid; X₃ is S; X₄ is I; X₅ is S; X₆ is S; X₇ is S; X₈ is D; X₉ is T; X₁₀ is T; X₁₁ is F; X₁₂ is V; and X₁₃ is I (VRC01hpL03 E1/I2 deletion/V3S; SEQ ID NO: 233);
(q) SEQ ID NO: 238, wherein X₁ is no amino acid; X₂ is no amino acid; X₃ is S; X₄ is Q; X₅ is S; X₆ is S; X₇ is N; X₈ is D; X₉ is T; X₁₀ is T; X₁₁ is F; X₁₂ is V; and X₁₃ is I (VRC01hpL04 E1/I2 deletion/V3S; SEQ ID NO: 234);
(r) SEQ ID NO: 238, wherein X₁ is no amino acid; X₂ is no amino acid; X₃ is S; X₄ is Q; X₅ is S; X₆ is S; X₇ is N; X₈ is D; X₉ is T; X₁₀ is T; X₁₁ is F; X₁₂ is Q; and X₁₃ is N (VRC01hpL05 E1/I2 deletion/V3S; SEQ ID NO: 235);
(s) SEQ ID NO: 238, wherein X₁ is no amino acid; X₂ is no amino acid; X₃ is S; X₄ is E; X₅ is K; X₆ is E; X₇ is E; X₈ is E; X₉ is R; X₁₀ is R; X₁₁ is F; X₁₂ is Q; and X₁₃ is N (VRC01hpL06 E1/I2 deletion/V3S; SEQ ID NO: 236);
(t) SEQ ID NO: 238, wherein X₁ is no amino acid; X₂ is no amino acid; X₃ is E; X₄ is Q; X₅ is S; X₆ is S; X₇ is N; X₈ is D; X₉ is T; X₁₀ is T; X₁₁ is F; X₁₂ is V; and X₁₃ is I (VRC01hpL04 E1/I2 deletion/V3E; SEQ ID NO: 237);
(u) SEQ ID NO: 238, wherein X₁ is no amino acid; X₂ is no amino acid; X₃ is V; X₄ is I; X₅ is S; X₆ is S; X₇ is W; X₈ is D; X₉ is N; X₁₀ is T; X₁₁ is F; X₁₂ is V; and X₁₃ is I (VRC01 E1/I2 deletion; SEQ ID NO: 53); or
(v) SEQ ID NO: 238, wherein X₁ is no amino acid; X₂ is no amino acid; X₃ is V; X₄ is T; X₅ is S; X₆ is S; X₇ is S; X₈ is D; X₉ is T; X₁₀ is T; X₁₁ is F; X₁₂ is Q; and X₁₃ is N (VRC01hpL02; SEQ ID NO: 50).

8. The isolated monoclonal antibody or antigen binding fragment of claim 1, wherein the heavy chain variable domain of the antibody comprises SEQ ID NO: 40, wherein X₁ is I, X₂ is H, X₃ is S and X₄ is T (VRC07 G54H; SEQ ID NO: 32), and the light chain of the antibody comprises:
(a) SEQ ID NO: 238, wherein X₁ is E; X₂ is I; X₃ is V; X₄ is I; X₅ is S; X₆ is S; X₇ is W; X₈ is D; X₉ is N; X₁₀ is T; X₁₁ is F; X₁₂ is V; X₁₃ is I (VRC01 light chain; SEQ ID NO: 9);
(b) SEQ ID NO: 238, wherein X₁ is no amino acid; X₂ is no amino acid; X₃ is E; X₄ is I; X₅ is S; X₆ is S; X₇ is W; X₈ is D; X₉ is N; X₁₀ is T; X₁₁ is F; X₁₂ is V; and X₁₃ is I (VRC01L E1/I2del-V3E; SEQ ID NO: 219);
(c) SEQ ID NO: 238, wherein X₁ is no amino acid; X₂ is no amino acid; X₃ is K; X₄ is I; X₅ is S; X₆ is S; X₇ is W; X₈ is D; X₉ is N; X₁₀ is T; X₁₁ is F; X₁₂ is V; and X₁₃ is I (VRC01L V3K light chain; SEQ ID NO: 220);
(d) SEQ ID NO: 238, wherein X₁ is no amino acid; X₂ is no amino acid; X₃ is S; X₄ is I; X₅ is S; X₆ is S; X₇ is W; X₈ is D; X₉ is N; X₁₀ is T; X₁₁ is F; X₁₂ is V; and X₁₃ is I (VRC01L E1/I2del V3S light chain; SEQ ID NO: 221);
(e) SEQ ID NO: 238, wherein X₁ is no amino acid; X₂ is no amino acid; X₃ is V; X₄ is I; X₅ is S; X₆ is S; X₇ is W; X₈ is D; X₉ is N; X₁₀ is T; X₁₁ is D; X₁₂ is V; and X₁₃ is I (VRC01L E1/I2del F97D; SEQ ID NO: 222);
(f) SEQ ID NO: 238, wherein X₁ is no amino acid; X₂ is no amino acid; X₃ is V; X₄ is I; X₅ is S; X₆ is S; X₇ is W; X₈ is D; X₉ is N; X₁₀ is T; X₁₁ is K; X₁₂ is V; and X₁₃ is I (VRC01L E1/I2del F97K; SEQ ID NO: 223);
(g) SEQ ID NO: 238, wherein X₁ is no amino acid; X₂ is no amino acid; X₃ is V; X₄ is I; X₅ is S; X₆ is S; X₇ is W; X₈ is D; X₉ is N; X₁₀ is T; X₁₁ is S; X₁₂ is V; and X₁₃ is I (VRC01L E1/I2del F97S; SEQ ID NO: 224);
(h) SEQ ID NO: 238, wherein X₁ is no amino acid; X₂ is no amino acid; X₃ is V; X₄ is I; X₅ is S; X₆ is S; X₇ is W; X₈ is D; X₉ is N; X₁₀ is T; X₁₁ is H; X₁₂ is V; and X₁₃ is I (VRC01L E1/I2del F97H; SEQ ID NO: 225);
(i) SEQ ID NO: 238, wherein X₁ is no amino acid; X₂ is no amino acid; X₃ is E; X₄ is I; X₅ is S; X₆ is S; X₇ is W; X₈ is D; X₉ is N; X₁₀ is T; X₁₁ is S; X₁₂ is V; and X₁₃ is I (VRC01L E1/I2del V3E/F97S; SEQ ID NO: 226);
(j) SEQ ID NO: 238, wherein X₁ is no amino acid; X₂ is no amino acid; X₃ is E; X₄ is I; X₅ is S; X₆ is S; X₇ is W; X₈ is D; X₉ is N; X₁₀ is T; X₁₁ is H; X₁₂ is V; and X₁₃ is I (VRC01L E1/I2del V3E/F97H; SEQ ID NO: 227);
(k) SEQ ID NO: 238, wherein X₁ is no amino acid; X₂ is no amino acid; X₃ is V; X₄ is I; X₅ is S; X₆ is S; X₇ is S; X₈ is D; X₉ is T; X₁₀ is T; X₁₁ is F; X₁₂ is V; and X₁₃ is I (VRC01hpL03; SEQ ID NO: 228);
(l) SEQ ID NO: 238, wherein X₁ is no amino acid; X₂ is no amino acid; X₃ is V; X₄ is Q; X₅ is S; X₆ is S; X₇ is N; X₈ is D; X₉ is T; X₁₀ is T; X₁₁ is F; X₁₂ is V; and X₁₃ is I (VRC01hpL04; SEQ ID NO: 229);
(m) SEQ ID NO: 238, wherein X₁ is no amino acid; X₂ is no amino acid; X₃ is V; X₄ is Q; X₅ is S; X₆ is S; X₇ is N; X₈ is D; X₉ is T; X₁₀ is T; X₁₁ is F; X₁₂ is Q; and X₁₃ is N (VRC01hpL05; SEQ ID NO: 230);
(n) SEQ ID NO: 238, wherein X₁ is no amino acid; X₂ is no amino acid; X₃ is V; X₄ is E; X₅ is K; X₆ is E; X₇ is E; X₈ is E; X₉ is R; X₁₀ is R; X₁₁ is F; X₁₂ is Q; and X₁₃ is N (VRC01hpL06; SEQ ID NO: 231);
(o) SEQ ID NO: 238, wherein X₁ is no amino acid; X₂ is no amino acid; X₃ is S; X₄ is T; X₅ is S; X₆ is S; X₇ is S; X₈ is D; X₉ is T; X₁₀ is T; X₁₁ is F; X₁₂ is Q; and X₁₃ is N (VRC01hpL02 E1/I2 deletion/V3S; SEQ ID NO: 232);
(p) SEQ ID NO: 238, wherein X₁ is no amino acid; X₂ is no amino acid; X₃ is S; X₄ is I; X₅ is S; X₆ is S; X₇ is S; X₈ is D; X₉ is T; X₁₀ is T; X₁₁ is F; X₁₂ is V; and X₁₃ is I (VRC01hpL03 E1/I2 deletion/V3S; SEQ ID NO: 233);
(q) SEQ ID NO: 238, wherein X₁ is no amino acid; X₂ is no amino acid; X₃ is S; X₄ is Q; X₅ is S; X₆ is S; X₇ is N; X₈ is D; X₉ is T; X₁₀ is T; X₁₁ is F; X₁₂ is V; and X₁₃ is I (VRC01hpL04 E1/I2 deletion/V3S; SEQ ID NO: 234);
(r) SEQ ID NO: 238, wherein X₁ is no amino acid; X₂ is no amino acid; X₃ is S; X₄ is Q; X₅ is S; X₆ is S; X₇ is N; X₈ is D; X₉ is T; X₁₀ is T; X₁₁ is F; X₁₂ is Q; and X₁₃ is N (VRC01hpL05 E1/I2 deletion/V3S; SEQ ID NO: 235);
(s) SEQ ID NO: 238, wherein X₁ is no amino acid; X₂ is no amino acid; X₃ is S; X₄ is E; X₅ is K; X₆ is E; X₇ is E; X₈ is E; X₉ is R; X₁₀ is R; X₁₁ is F; X₁₂ is Q; and X₁₃ is N (VRC01hpL06 E1/I2 deletion/V3S; SEQ ID NO: 236);
(t) SEQ ID NO: 238, wherein X₁ is no amino acid; X₂ is no amino acid; X₃ is E; X₄ is Q; X₅ is S; X₆ is S; X₇ is N; X₈ is D; X₉ is T; X₁₀ is T; X₁₁ is F; X₁₂ is V; and X₁₃ is I (VRC01hpL04 E1/I2 deletion/V3E; SEQ ID NO: 237);
(u) SEQ ID NO: 238, wherein X₁ is no amino acid; X₂ is no amino acid; X₃ is V; X₄ is I; X₅ is S; X₆ is S; X₇ is W; X₈ is D; X₉ is N; X₁₀ is T; X₁₁ is F; X₁₂ is V; and X₁₃ is I (VRC01 E1/I2 deletion; SEQ ID NO: 53); or
(v) SEQ ID NO: 238, wherein X₁ is no amino acid; X₂ is no amino acid; X₃ is V; X₄ is T; X₅ is S; X₆ is S; X₇ is S; X₈ is D; X₉ is T; X₁₀ is T; X₁₁ is F; X₁₂ is Q; and X₁₃ is N (VRC01hpL02; SEQ ID NO: 50).

9. The isolated monoclonal antibody or antigen binding fragment of claim 1, wherein the heavy chain variable domain of the antibody comprises SEQ ID NO: 40, wherein X₁ is V, X₂ is H, X₃ is S and X₄ is A (VRC07 I37V, G54H, T93A; SEQ ID NO: 259), and the light chain of the antibody comprises:
(a) SEQ ID NO: 238, wherein X₁ is E; X₂ is I; X₃ is V; X₄ is I; X₅ is S; X₆ is S; X₇ is W; X₈ is D; X₉ is N; X₁₀ is T; X₁₁ is F; X₁₂ is V; X₁₃ is I (VRC01 light chain; SEQ ID NO: 9);
(b) SEQ ID NO: 238, wherein X₁ is no amino acid; X₂ is no amino acid; X₃ is E; X₄ is I; X₅ is S; X₆ is S; X₇ is W; X₈ is D; X₉ is N; X₁₀ is T; X₁₁ is F; X₁₂ is V; and X₁₃ is I (VRC01L E1/I2del-V3E; SEQ ID NO: 219);
(c) SEQ ID NO: 238, wherein X₁ is no amino acid; X₂ is no amino acid; X₃ is K; X₄ is I; X₅ is S; X₆ is S; X₇ is W; X₈ is D; X₉ is N; X₁₀ is T; X₁₁ is F; X₁₂ is V; and X₁₃ is I (VRC01L V3K light chain; SEQ ID NO: 220);
(d) SEQ ID NO: 238, wherein X₁ is no amino acid; X₂ is no amino acid; X₃ is S; X₄ is I; X₅ is S; X₆ is S; X₇ is W; X₈ is D; X₉ is N; X₁₀ is T; X₁₁ is F; X₁₂ is V; and X₁₃ is I (VRC01L E1/I2del V3S light chain; SEQ ID NO: 221);
(e) SEQ ID NO: 238, wherein X₁ is no amino acid; X₂ is no amino acid; X₃ is V; X₄ is I; X₅ is S; X₆ is S; X₇ is W; X₈ is D; X₉ is N; X₁₀ is T; X₁₁ is D; X₁₂ is V; and X₁₃ is I (VRC01L E1/I2del F97D; SEQ ID NO: 222);
(f) SEQ ID NO: 238, wherein X₁ is no amino acid; X₂ is no amino acid; X₃ is V; X₄ is I; X₅ is S; X₆ is S; X₇ is W; X₈ is D; X₉ is N; X₁₀ is T; X₁₁ is K; X₁₂ is V; and X₁₃ is I (VRC01L E1/I2del F97K; SEQ ID NO: 223);
(g) SEQ ID NO: 238, wherein X₁ is no amino acid; X₂ is no amino acid; X₃ is V; X₄ is I; X₅ is S; X₆ is S; X₇ is W; X₈ is D; X₉ is N; X₁₀ is T; X₁₁ is S; X₁₂ is V; and X₁₃ is I (VRC01L E1/I2del F97S; SEQ ID NO: 224);
(h) SEQ ID NO: 238, wherein X₁ is no amino acid; X₂ is no amino acid; X₃ is V; X₄ is I; X₅ is S; X₆ is S; X₇ is W; X₈ is D; X₉ is N; X₁₀ is T; X₁₁ is H; X₁₂ is V; and X₁₃ is I (VRC01L E1/I2del F97H; SEQ ID NO: 225);
(i) SEQ ID NO: 238, wherein X₁ is no amino acid; X₂ is no amino acid; X₃ is E; X₄ is I; X₅ is S; X₆ is S; X₇ is W; X₈ is D; X₉ is N; X₁₀ is T; X₁₁ is S; X₁₂ is V; and X₁₃ is I (VRC01L E1/I2del V3E/F97S; SEQ ID NO: 226);
(j) SEQ ID NO: 238, wherein X₁ is no amino acid; X₂ is no amino acid; X₃ is E; X₄ is I; X₅ is S; X₆ is S; X₇ is W; X₈ is D; X₉ is N; X₁₀ is T; X₁₁ is H; X₁₂ is V; and X₁₃ is I (VRC01L E1/I2del V3E/F97H; SEQ ID NO: 227);
(k) SEQ ID NO: 238, wherein X₁ is no amino acid; X₂ is no amino acid; X₃ is V; X₄ is I; X₅ is S; X₆ is S; X₇ is S; X₈ is D; X₉ is T; X₁₀ is T; X₁₁ is F; X₁₂ is V; and X₁₃ is I (VRC01hpL03; SEQ ID NO: 228);
(l) SEQ ID NO: 238, wherein X₁ is no amino acid; X₂ is no amino acid; X₃ is V; X₄ is Q; X₅ is S; X₆ is S; X₇ is N; X₈ is D; X₉ is T; X₁₀ is T; X₁₁ is F; X₁₂ is V; and X₁₃ is I (VRC01hpL04; SEQ ID NO: 229);
(m) SEQ ID NO: 238, wherein X₁ is no amino acid; X₂ is no amino acid; X₃ is V; X₄ is Q; X₅ is S; X₆ is S; X₇ is N; X₈ is D; X₉ is T; X₁₀ is T; X₁₁ is F; X₁₂ is Q; and X₁₃ is N (VRC01hpL05; SEQ ID NO: 230);
(n) SEQ ID NO: 238, wherein X₁ is no amino acid; X₂ is no amino acid; X₃ is V; X₄ is E; X₅ is K; X₆ is E; X₇ is E; X₈ is E; X₉ is R; X₁₀ is R; X₁₁ is F; X₁₂ is Q; and X₁₃ is N (VRC01hpL06; SEQ ID NO: 231);
(o) SEQ ID NO: 238, wherein X₁ is no amino acid; X₂ is no amino acid; X₃ is S; X₄ is T; X₅ is S; X₆ is S; X₇ is S; X₈ is D; X₉ is T; X₁₀ is T; X₁₁ is F; X₁₂ is Q; and X₁₃ is N (VRC01hpL02 E1/I2 deletion/V3S; SEQ ID NO: 232);
(p) SEQ ID NO: 238, wherein X₁ is no amino acid; X₂ is no amino acid; X₃ is S; X₄ is I; X₅ is S; X₆ is S; X₇ is S; X₈ is D; X₉ is T; X₁₀ is T; X₁₁ is F; X₁₂ is V; and X₁₃ is I (VRC01hpL03 E1/I2 deletion/V3S; SEQ ID NO: 233);
(q) SEQ ID NO: 238, wherein X₁ is no amino acid; X₂ is no amino acid; X₃ is S; X₄ is Q; X₅ is S; X₆ is S; X₇ is N; X₈ is D; X₉ is T; X₁₀ is T; X₁₁ is F; X₁₂ is V; and X₁₃ is I (VRC01hpL04 E1/I2 deletion/V3S; SEQ ID NO: 234);
(r) SEQ ID NO: 238, wherein X₁ is no amino acid; X₂ is no amino acid; X₃ is S; X₄ is Q; X₅ is S; X₆ is S; X₇ is N; X₈ is D; X₉ is T; X₁₀ is T; X₁₁ is F; X₁₂ is Q; and X₁₃ is N (VRC01hpL05 E1/I2 deletion/V3S; SEQ ID NO: 235);
(s) SEQ ID NO: 238, wherein X₁ is no amino acid; X₂ is no amino acid; X₃ is S; X₄ is E; X₅ is K; X₆ is E; X₇ is E; X₈ is E; X₉ is R; X₁₀ is R; X₁₁ is F; X₁₂ is Q; and X₁₃ is N (VRC01hpL06 E1/I2 deletion/V3S; SEQ ID NO: 236);
(t) SEQ ID NO: 238, wherein X₁ is no amino acid; X₂ is no amino acid; X₃ is E; X₄ is Q; X₅ is S; X₆ is S; X₇ is N; X₈ is D; X₉ is T; X₁₀ is T; X₁₁ is F; X₁₂ is V; and X₁₃ is I (VRC01hpL04 E1/I2 deletion/V3E; SEQ ID NO: 237);
(u) SEQ ID NO: 238, wherein X₁ is no amino acid; X₂ is no amino acid; X₃ is V; X₄ is I; X₅ is S; X₆ is S; X₇ is W; X₈ is D; X₉ is N; X₁₀ is T; X₁₁ is F; X₁₂ is V; and X₁₃ is I (VRC01 E1/I2 deletion; SEQ ID NO: 53); or
(v) SEQ ID NO: 238, wherein X₁ is no amino acid; X₂ is no amino acid; X₃ is V; X₄ is T; X₅ is S; X₆ is S; X₇ is S; X₈ is D; X₉ is T; X₁₀ is T; X₁₁ is F; X₁₂ is Q; and X₁₃ is N (VRC01hpL02; SEQ ID NO: 50).

10. An isolated monoclonal antibody or antigen binding fragment thereof, comprising a heavy chain variable domain and a light chain variable domain, wherein the heavy chain variable domain of the antibody comprises amino acids 26-33 (CDR1), 51-58 (CDR2) and 97-114 (CDR3) of SEQ ID NO: 40, and the light chain variable domain comprises a light chain variable domain from a VRC01-like monoclonal antibody, wherein the antibody specifically binds gp120 of HIV-1, and wherein the antibody is neutralizing.

11. The isolated monoclonal antibody or antigen binding fragment of claim 10, wherein the light chain variable domain comprises a light chain variable domain from one of VRC02, VRC03, NIH4546, VRC-PG04, VRC-PG04b, VRC-CH30, VRC-CH31, VRC-CH32, VRC-CH33, VRC-CH34, 3BNC60, 3BNC117, 12A12, 12A21, 1NC9, 1B2530, 8ANC131, or 8ANC134 monoclonal antibodies.

12. The isolated monoclonal antibody or antigen binding fragment of claim 10, wherein the light chain comprises a light chain variable domain of a clonal variant of VRC01.

13. An isolated monoclonal antibody or antigen binding fragment, comprising a heavy chain variable domain and a light chain variable domain, wherein the light chain variable domain of the antibody comprises amino acids 27-30 (CDR1), 48-50 (CDR2) and 87-91 (CDR3) of SEQ ID NO: 238, wherein the light chain variable domain comprises at least one amino acid substitution compared to SEQ ID NO: 9 (VRC01 light chain variable domain), wherein the heavy chain variable domain is a heavy chain variable domain from a VRC01-like monoclonal antibody, wherein the antibody specifically binds gp120 of HIV-1, and wherein the antibody is neutralizing.

14. The isolated monoclonal antibody or antigen binding fragment of claim 13, wherein the heavy chain variable domain comprises a heavy chain variable domain from one of VRC02, VRC03, NIH4546, NIH4546 G54W, VRC-PG04, VRC-PG04b, VRC-CH30, VRC-CH31, VRC-CH32, VRC-CH33, VRC-CH34, 3BNC60, 3BNC117, 12A12, 12A21, 1NC9, 1B2530, 8ANC131 or 8ANC134 monoclonal antibodies.

15. The isolated monoclonal antibody or antigen binding fragment of claim 13, wherein the heavy chain comprises a heavy chain variable domain of a clonal variant of VRC01.

16. An isolated VRC01-like monoclonal antibody or antigen binding fragment thereof, comprising a VRC01-like heavy chain and a VRC01-like light chain, wherein the heavy chain further comprises substitution of a histidine residue for the residue at position 54 (Kabat numbering) of the heavy chain, wherein the antibody specifically binds gp120 of HIV-1, and wherein the antibody is neutralizing.

17. The isolated VRC01-like monoclonal antibody or antigen binding fragment of claim 16, wherein the amino acid substitution is a G54H substitution.

18. An isolated VRC01-like monoclonal antibody or antigen binding fragment, comprising a VRC01-like heavy chain and a VRC01-like light chain, further comprising deletion of the first two amino acids of the light chain wherein the antibody specifically binds gp120 of HIV-1, and wherein the antibody is neutralizing.

19. The isolated VRC01-like monoclonal antibody or antigen binding fragment of claim 16, wherein the VRC01-like monoclonal antibody is one of VRC01, VRC02, VRC03, NIH4546, NIH4546 G54W, VRC-PG04, VRC-PG04b, VRC-CH30, VRC-CH31, VRC-CH32, VRC-CH33, VRC-CH34, 3BNC60, 3BNC117, 12A12, 12A21, 1NC9, 1B2530, 8ANC131 or 8ANC134 monoclonal antibodies.

20. The isolated antibody or antigen binding fragment of claim 1, wherein the antibody or antigen binding fragment is not self-reactive.

21. The isolated monoclonal antibody of claim 1, wherein the antibody is an IgG, IgM or IgA.

22. (canceled)

23. The isolated antigen binding fragment of claim 1, wherein the fragment is a Fab fragment, a Fab′ fragment, a F(ab)′2 fragment, a single chain Fv protein (scFv), or a disulfide stabilized Fv protein (dsFv).

24. The isolated antigen binding fragment of claim 23, wherein the antigen binding fragment is a Fab or an scFv fragment.

25. The isolated human monoclonal antibody or antigen binding fragment of claim 1, linked to an effector moiety.

26. The isolated monoclonal antibody or antigen binding fragment of claim 25, wherein the effector moiety is a toxin or a detectable label.

27. The isolated monoclonal antibody or antigen binding fragment of claim 26, wherein the detectable label is a fluorescent, enzymatic, or radioactive label.

28. A scaffold protein comprising the antigen binding fragment of claim 1.

29. An isolated nucleic acid molecule encoding the monoclonal antibody or antigen binding fragment of claim 1.

30. The isolated nucleic acid molecule of claim 29, operably linked to a promoter.

31. An expression vector comprising the isolated nucleic acid molecule of claim 29.

32. An isolated host cell transformed with the nucleic acid molecule of claim 29.

33. A composition comprising a therapeutically effective amount of the antibody or antigen binding fragment of claim 1.

34. A method of detecting a human immunodeficiency virus (HIV)-1 infection in a subject, comprising:
contacting a biological sample from the subject with the isolated monoclonal antibody or antigen binding fragment of claim 1 under conditions sufficient to form an immune complex; and
detecting the presence of the immune complex on the sample from the subject, wherein the presence of the immune complex on the sample from the subject
indicates that the subject has an HIV-1 infection.

35. The method of claim 34, wherein the isolated human monoclonal antibody is directly labeled.

36. The method of claim 34, wherein the contacting is in vivo.

37. The method of claim 34, wherein the contacting is in vitro.

38. The method of claim 34, further comprising:
contacting the sample with a second antibody that specifically binds the isolated monoclonal antibody or antigen binding fragment; and
detecting the binding of the second antibody to the sample;
wherein an increase in binding of the second antibody to the sample as compared to binding of the second antibody to a control sample detects the presence of an HIV-1 infection the subject.

40. A method for preventing or treating a human immunodeficiency virus (HIV)-1 infection in a subject, comprising administering to the subject a therapeutically effective amount of the composition of claim 33, thereby preventing or treating the HIV-1 infection.

41. The method of claim 40, wherein the method is a method for treating a HIV-1 infection, and wherein the subject has acquired immune deficiency syndrome (AIDS).

42. The method of claim 40, further comprising administering to the subject an additional anti-viral agent.

43. The method of claim 42 wherein the additional antiviral agent comprises a nucleoside analog reverse-transcriptase inhibitor, a nucleotide reverse transcriptase inhibitor, a non-nucleoside reverse transcriptase inhibitor, a protease inhibitor, an entry or fusion inhibitor, a maturation inhibitor, or a broad spectrum inhibitor or a combination thereof.

44. The method of claim 40, further comprising administering to the subject one or more additional antibodies or antibody binding fragments, or nucleic acids-encoding such anti wherein the additional antibodies specifically bind gp120 and/or gp41.

45. The method of claim 40, further comprising administering to the subject an effective amount of IL-15.

46. The method of claim 40, further comprising measuring HIV-1 viral titer in the subject.

47. A method for testing a potential immunogen, comprising contacting the potential immunogen with the antibody or antigen binding fragment of claim 1, and detecting the binding of the antibody, antigen binding fragment or scaffold protein to the immunogen, thereby determining that the immunogen as being of use to produce an immune response to a human immunodeficiency virus.

48. A kit comprising:
(a) the antibody or antigen binding fragment of claim 1; and
(b) instructions for using the kit.

49. (canceled)

50. The expression vector of claim 31, wherein the vector is an adeno-associated viral vector.
